(19) United States
(12) Patent Application Publication
(10) Pub. No.: US 2002/0090672 A1
(43) Pub. Date: Jul. 11, 2002

(54) Nucleic acids, proteins, and antibodies

(76) Inventors: Craig A. Rosen, Laytonsville, MD (US); Steven M. Ruben, Olney, MD (US); Steven C. Barash, Rockville, MD (US)

Correspondence Address: HUMAN GENOME SCIENCES INC, 9410 KEY WEST AVENUE, ROCKVILLE, MD, 20850

(21) Appl. No.: 09/764,853

(22) Filed: Jan. 17, 2001

Related U.S. Application Data
(60) Provisional application No. 60/179,065, filed on Jan. 31, 2000.
(60) Provisional application No. 60/180,628, filed on Feb. 4, 2000.
(60) Provisional application No. 60/214,886, filed on Jun. 28, 2000.
(60) Provisional application No. 60/217,487, filed on Jul. 11, 2000.
(60) Provisional application No. 60/225,758, filed on Aug. 14, 2000.
(60) Provisional application No. 60/220,963, filed on Jul. 26, 2000.
(60) Provisional application No. 60/217,496, filed on Jul. 11, 2000.
(60) Provisional application No. 60/225,447, filed on Aug. 14, 2000.
(60) Provisional application No. 60/218,290, filed on Jul. 14, 2000.
(60) Provisional application No. 60/225,757, filed on Aug. 14, 2000.
(60) Provisional application No. 60/226,868, filed on Aug. 22, 2000.
(60) Provisional application No. 60/216,647, filed on Jul. 7, 2000.
(60) Provisional application No. 60/225,267, filed on Aug. 14, 2000.
(60) Provisional application No. 60/216,880, filed on Jul. 7, 2000.
(60) Provisional application No. 60/225,270, filed on Aug. 14, 2000.
(60) Provisional application No. 60/251,869, filed on Dec. 8, 2000.
(60) Provisional application No. 60/235,834, filed on Sep. 27, 2000.
(60) Provisional application No. 60/234,274, filed on Sep. 21, 2000.
(60) Provisional application No. 60/234,223, filed on Sep. 21, 2000.
(60) Provisional application No. 60/228,924, filed on Aug. 30, 2000.
(60) Provisional application No. 60/224,518, filed on Aug. 14, 2000.
(60) Provisional application No. 60/236,369, filed on Sep. 29, 2000.
(60) Provisional application No. 60/224,519, filed on Aug. 14, 2000.
(60) Provisional application No. 60/220,964, filed on Jul. 26, 2000.
(60) Provisional application No. 60/241,809, filed on Oct. 20, 2000.
(60) Provisional application No. 60/249,299, filed on Nov. 17, 2000.
(60) Provisional application No. 60/236,327, filed on Sep. 29, 2000.
(60) Provisional application No. 60/241,785, filed on Oct. 20, 2000.
(60) Provisional application No. 60/244,617, filed on Nov. 1, 2000.
(60) Provisional application No. 60/225,268, filed on Aug. 14, 2000.
(60) Provisional application No. 60/236,368, filed on Sep. 29, 2000.
(60) Provisional application No. 60/251,856, filed on Dec. 8, 2000.
(60) Provisional application No. 60/251,868, filed on Dec. 8, 2000.
(60) Provisional application No. 60/229,344, filed on Sep. 1, 2000.
(60) Provisional application No. 60/234,997, filed on Sep. 25, 2000.
(60) Provisional application No. 60/229,343, filed on Sep. 1, 2000.
(60) Provisional application No. 60/229,345, filed on Sep. 1, 2000.
(60) Provisional application No. 60/229,287, filed on Sep. 1, 2000.
(60) Provisional application No. 60/229,513, filed on Sep. 5, 2000.
(60) Provisional application No. 60/231,413, filed on Sep. 8, 2000.
(60) Provisional application No. 60/229,509, filed on Sep. 5, 2000.
(60) Provisional application No. 60/236,367, filed on Sep. 29, 2000.
(60) Provisional application No. 60/237,039, filed on Oct. 2, 2000.
(60) Provisional application No. 60/237,038, filed on Oct. 2, 2000.
(60) Provisional application No. 60/236,370, filed on Sep. 29, 2000.
(60) Provisional application No. 60/236,802, filed on Oct. 2, 2000.
(60) Provisional application No. 60/237,037, filed on Oct. 2, 2000.
(60) Provisional application No. 60/237,040, filed on Oct. 2, 2000.
(60) Provisional application No. 60/240,960, filed on Oct. 20, 2000.
(60) Provisional application No. 60/239,935, filed on Oct. 13, 2000.

(51) Int. Cl. C12P 21/02; C12Q 1/68; G01N 33/53; C07H 21/04

(52) U.S. Cl. 435/69.1; 435/6; 435/7.1; 435/325; 435/320.1; 536/23.1

(57) ABSTRACT

The present invention relates to novel proteins. More specifically, isolated nucleic acid molecules are provided encoding novel polypeptides. Novel polypeptides and antibodies that bind to these polypeptides are provided. Also provided are vectors, host cells, and recombinant and synthetic methods for producing human polynucleotides and/or polypeptides, and antibodies. The invention further relates to diagnostic and therapeutic methods useful for diagnosing, treating, preventing and/or prognosing disorders related to these novel polypeptides. The invention further relates to screening methods for identifying agonists and antagonists of polynucleotides and polypeptides of the invention. The present invention further relates to methods and/or compositions for inhibiting or enhancing the production and function of the polypeptides of the present invention.

### STATEMENT UNDER 37 C.F.R. § 1.77(b)(4)

[0001] This application refers to a “Sequence Listing” listed below, which is provided as an electronic document on two identical compact discs (CD-R), labeled “Copy 1” and “Copy 2.” These compact discs each contain the following files, which are hereby incorporated in their entirety herein:

| | | | Date of |
|---|---|---|---|
| Document | File Name | Size in bytes | Creation |
| Sequence Listing | PJZ06_seqList.txt | 1,912,237 | 01/15/2001 |
| V Viewer Setup File | SetupDLL.exe | 695,808 | 12/19/2000 |
| V Viewer Help | v.cnt | 7,984 | 01/05/2001 |
| File Controller | | | |
| V Viewer Program | v.exe | 753,664 | 12/19/2000 |
| File | | | |
| V Viewer Help File | v.hlp | 447,766 | 01/05/2001 |

[0002] The Sequence Listing may be viewed on an IBM-PC machine running the MS-Windows operating system by using the V viewer software, licensed by HGS, Inc., included on the compact discs (see World Wide Web URL: http://www.fileviewer.com).

### FIELD OF THE INVENTION

[0003] The present invention relates to novel proteins. More specifically, isolated nucleic acid molecules are provided encoding novel polypeptides. Novel polypeptides and antibodies that bind to these polypeptides are provided. Also provided are vectors, host cells, and recombinant and synthetic methods for producing human polynucleotides and/or polypeptides, and antibodies. The invention further relates to diagnostic and therapeutic methods useful for diagnosing, treating, preventing and/or prognosing disorders related to these novel polypeptides. The invention further relates to screening methods for identifying agonists and antagonists of polynucleotides and polypeptides of the invention. The present invention further relates to methods and/or compositions for inhibiting or enhancing the production and function of the polypeptides of the present invention.

### BACKGROUND OF THE INVENTION

[0004] Inflammation, which is characterized by redness, swelling, heat, and pain, is an essential immune response which occurs following tissue injury or infection. The initial stimulus (i.e injury, infection) triggers the release of pro-inflammatory proteins, including histamine, prostaglandins, kinins, leukotrienes, and cytokines, which mediate increased local blood flow, blood clotting, vascular permeability, and leukocyte chemoattraction. As a result of these changes, plasma components such as complement proteins, clotting factors, fibrinogen, and antibody proteins accumulate in the injured or infected tissue. The acute changes also facilitate the recruitment of phagocytic leukocytes to the site of injury or infection. Chemokines released from the site of inflammation mediate leukocyte recruitment, in part by inducing the expression of cell adhesion molecules on activated monocytes and neutrophils Once at the affected site, plasma proteins and immune cells begin to neutralize pathogens and contribute to tissue repair.

[0005] In most cases, inflammation leads to the resolution of the infection or injury, followed by termination of the inflammatory response. However, in some cases a sustained inflammatory response persists. Chronic inflammation can occur when an invading organism has not been eliminated, such as in untreated tuberculosis and leprosy, or when an endogenous protein becomes immunogenic, resulting in autoimmune disorders. Inappropriate or excessive activation of inflammation can lead to tissue damage and even death.

[0006] Inflammation can effect virtually any tissue of the body, and plays an important role in many diseases, including infections (e.g. pneumonia, Legionnaires' disease, tuberculosis, meningitis, encephalitis, viral hepatitis and septic shock), hypersensitivities (e.g., allergic rhinitis, skin allergies, anaphylaxis and asthma), and autoimmune disorders (e.g. multiple sclerosis, rheumatoid arthritis, myasthenia gravis, myocarditis, and vasculitis, to name but a few).

[0007] Inflammation can also be a life-threatening complication of severe physical trauma (e.g. traumatic head injury), burns, cardiopulmonary bypass surgery, renal ischemia-reperfusion, and organ transplant surgery.

[0008] Furthermore, chronic inflammation increases the risk of cancer (Wiseman and Halliwell, Biochem. J. 313:17-29 (1996). For example, patients with inflammatory bowel disease are at higher risk of developing gastrointestinal cancer (Lewis et al., Gastroenterol. Clin. North Amer. 28(2):459-77 (1999)), while lung cancer has been linked to chemical-induced lung inflammation (Emmendoerffer et al., Toxicol. Lett. 112-113: 185-191 (2000)).

[0009] Many of the physiological correlates of inflammation are mediated by the hormonal actions of prostaglandins, a class of cyclic unsaturated fatty acids that are converted from arachidonic acid by cyclooxygenase. Attempts to ameliorate the symptoms of inflammation center around decreasing prostaglandin production by inhibiting the key synthetic enzymes, cyclooxygenase and phopholipase A2. Steroidal drugs such as prednisone and cortisone, and non-steroidal drugs such as aspirin and ibuprofen, are frequently used to treat the symptoms of inflammation. However, these therapies are accompanied by side effects, ranging from stomach irritation to osteoporosis, which limit their usefulness. Therefore, there is a continuing need for more effective and less toxic alternatives for modulating the inflammatory response.

[0010] The discovery of new human inflammation-associated polynucleotides, the polypeptides encoded by them, and antibodies that immunospecifically bind these polypeptides, satisfies a need in the art by providing new compositions which are useful in the diagnosis, treatment, prevention and/or prognosis of inflammatory diseases, disorders, and/or conditions, including, but not limited to, viral, bacterial, fungal, and parasitic infections; hypersensitivities; autoimmune disorders; physical trauma; organ transplant rejection; and cancer.

### SUMMARY OF THE INVENTION

[0011] The present invention relates to novel proteins. More specifically, isolated nucleic acid molecules are provided encoding novel polypeptides. Novel polypeptides and antibodies that bind to these polypeptides are provided. Also provided are vectors, host cells, and recombinant and synthetic methods for producing human polynucleotides and/or polypeptides, and antibodies. The invention further relates to diagnostic and therapeutic methods useful for diagnosing, treating, preventing and/or prognosing disorders related to these novel polypeptides. The invention further relates to screening methods for identifying agonists and antagonists of polynucleotides and polypeptides of the invention. The present invention further relates to methods and/or compositions for inhibiting or enhancing the production and function of the polypeptides of the present invention.

[0012] DETAILED DESCRIPTION

[0013] Tables

[0014] Table 1A summarizes some of the polynucleotides encompassed by the invention (including cDNA clones related to the sequences (Clone ID NO:Z), contig sequences (contig identifier (Contig ID:) and contig nucleotide sequence identifier (SEQ ID NO:X)) and further summarizes certain characteristics of these polynucleotides and the polypeptides encoded thereby. The first column provides the gene number in the application for each clone identifier. The second column provides a unique clone identifier, “Clone ID NO:Z”, for a cDNA clone related to each contig sequence disclosed in Table 1A. The third column provides a unique contig identifier, “Contig ID:” for each of the contig sequences disclosed in Table 1A. The fourth column provides the sequence identifier, “SEQ ID NO:X”, for each of the contig sequences disclosed in Table 1A. The fifth column, “ORF (From-To)”, provides the location (i.e., nucleotide position numbers) within the polynucleotide sequence of SEQ ID NO:X that delineate the preferred open reading frame (ORF) that encodes the amino acid sequence shown in the sequence listing and referenced in Table 1A as SEQ ID NO:Y (column 6). Column 7 lists residues comprising predicted epitopes contained in the polypeptides encoded by each of the preferred ORFs (SEQ ID NO:Y). Identification of potential immunogenic regions was performed according to the method of Jameson and Wolf (CABIOS, 4; 181-186 (1988)); specifically, the Genetics Computer Group (GCG) implementation of this algorithm, embodied in the program PEPTIDESTRUCTURE (Wisconsin Package v10.0, Genetics Computer Group (GCG), Madison, Wisc.). This method returns a measure of the probability that a given residue is found on the surface of the protein. Regions where the antigenic index score is greater than 0.9 over at least 6 amino acids are indicated in Table 1A as “Predicted Epitopes”. In particular embodiments, polypeptides of the invention comprise, or alternatively consist of, one, two, three, four, five or more of the predicted epitopes described in Table 1A. It will be appreciated that depending on the analytical criteria used to predict antigenic determinants, the exact address of the determinant may vary slightly. Column 8, “Tissue Distribution” shows the expression profile of tissue, cells, and/or cell line libraries which express the polynucleotides of the invention. The first number in column 8 (preceding the colon), represents the tissue/cell source identifier code corresponding to the key provided in Table 4. Expression of these polynucleotides was not observed in the other tissues and/or cell libraries tested. For those identifier codes in which the first two letters are not “AR”, the second number in column 8 (following the colon), represents the number of times a sequence corresponding to the reference polynucleotide sequence (e.g., SEQ ID NO:X) was identified in the tissue/cell source. Those tissue/cell source identifier codes in which the first two letters are “AR” designate information generated using DNA array technology. Utilizing this technology, cDNAs were amplified by PCR and then transferred, in duplicate, onto the array. Gene expression was assayed through hybridization of first strand cDNA probes to the DNA array. cDNA probes were generated from total RNA extracted from a variety of different tissues and cell lines. Probe synthesis was performed in the presence of ³³P dCTP, using oligo (dT) to prime reverse transcription. After hybridization, high stringency washing conditions were employed to remove non-specific hybrids from the array. The remaining signal, emanating from each gene target, was measured using a Phosphorimager. Gene expression was reported as Phosphor Stimulating Luminescence (PSL) which reflects the level of phosphor signal generated from the probe hybridized to each of the gene targets represented on the array. A local background signal subtraction was performed before the total signal generated from each array was used to normalize gene expression between the different hybridizations. The value presented after “[array code]:” represents the mean of the duplicate values, following background subtraction and probe normalization. One of skill in the art could routinely use this information to identify normal and/or diseased tissue(s) which show a predominant expression pattern of the corresponding polynucleotide of the invention or to identify polynucleotides which show predominant and/or specific tissue and/or cell expression. Column 9 provides the chromosomal location of polynucleotides corresponding to SEQ ID NO:X. Chromosomal location was determined by finding exact matches to EST and cDNA sequences contained in the NCBI (National Center for Biotechnology Information) UniGene database. Given a presumptive chromosomal location, disease locus association was determined by comparison with the Morbid Map, derived from Online Mendelian Inheritance in Man (Online Mendelian Inheritance in Man, OMIM™. McKusick-Nathans Institute for Genetic Medicine, Johns Hopkins University (Baltimore, Md.) and National Center for Biotechnology Information, National Library of Medicine (Bethesda, Md.) 2000. World Wide Web URL: http://www.ncbi.nlm.nih.gov/omim/). If the putative chromosomal location of the Query overlaps with the chromosomal location of a Morbid Map entry, an OMIM identification number is disclosed in column 10 labeled “OMIM Disease Reference(s)”. A key to the OMIM reference identification numbers is provided in Table 5.

[0015] Table 1B summarizes additional polynucleotides encompassed by the invention (including cDNA clones related to the sequences (Clone ID NO:Z), contig sequences (contig identifier (Contig ID:) contig nucleotide sequence identifiers (SEQ ID NO:X)), and genomic sequences (SEQ ID NO:B). The first column provides a unique clone identifier, “Clone ID NO:Z”, for a cDNA clone related to each contig sequence. The second column provides the sequence identifier, “SEQ ID NO:X”, for each contig sequence. The third column provides a unique contig identifier, “Contig ID:” for each contig sequence. The fourth column, provides a BAC identifier “BAC ID NO:A” for the BAC clone referenced in the corresponding row of the table. The fifth column provides the nucleotide sequence identifier, “SEQ ID NO:B” for a fragment of the BAC clone identified in column four of the corresponding row of the table. The sixth column, “Exon From-To”, provides the location (i.e., nucleotide position numbers) within the polynucleotide sequence of SEQ ID NO:B which delineate certain polynucleotides of the invention that are also exemplary members of polynucleotide sequences that encode polypeptides of the invention (e.g., polypeptides containing amino acid sequences encoded by the polynucleotide sequences delineated in column six, and fragments and variants thereof).

[0016] Table 2 summarizes homology and features of some of the polypeptides of the invention. The first column provides a unique clone identifier, “Clone ID NO:Z”, corresponding to a cDNA clone disclosed in Table 1A. The second column provides the unique contig identifier, “Contig ID:” corresponding to contigs in Table 1A and allowing for correlation with the information in Table 1A. The third column provides the sequence identifier, “SEQ ID NO:X”, for the contig polynucleotide sequence. The fourth column provides the analysis method by which the homology/identity disclosed in the Table was determined. Comparisons were made between polypeptides encoded by the polynucleotides of the invention and either a non-redundant protein database (herein referred to as “NR”), or a database of protein families (herein referred to as “PFAM”) as further described below. The fifth column provides a description of the PFAM/NR hit having L significant match to a polypeptide of the invention. Column six provides the accession number of the PFAM/NR hit disclosed in the fifth column. Column seven, “Score/Percent Identity”, provides a quality score or the percent identity, of the hit disclosed in columns five and six. Columns 8 and 9, “NT From” and “NT To” respectively, delineate the polynucleotides in “SEQ ID NO:X” that encode a polypeptide having a significant match to the PFAM/NR database as disclosed in the fifth and sixth columns. In specific embodiments polypeptides of the invention comprise, or alternatively consist of, an amino acid sequence encoded by a polynucleotide in SEQ ID NO:X as delineated in columns 8 and 9, or fragments or variants thereof.

[0017] Table 3 provides polynucleotide sequences that may be disclaimed according to certain embodiments of the invention. The first column provides a unique clone identifier, “Clone ID”, for a cDNA clone related to contig sequences disclosed in Table 1A. The second column provides the sequence identifier, “SEQ ID NO:X”, for contig sequences disclosed in Table 1A. The third column provides the unique contig identifier, “Contig ID:”, for contigs disclosed in Table 1A. The fourth column provides a unique integer ‘a’ where ‘a’ is any integer between 1 and the final nucleotide minus 15 of SEQ ID NO:X, and the fifth column provides a unique integer ‘b’ where ‘b’ is any integer between 15 and the final nucleotide of SEQ ID NO:X, where both a and b correspond to the positions of nucleotide residues shown in SEQ ID NO:X, and where b is greater than or equal to a +14. For each of the polynucleotides shown as SEQ ID NO:X, the uniquely defined integers can be substituted into the general formula of a-b, and used to describe polynucleotides which may be preferably excluded from the invention. In certain embodiments, preferably excluded from the invention are at least one, two, three, four, five, ten, or more of the polynucleotide sequence(s) having the accession number(s) disclosed in the sixth column of this Table (including for example, published sequence in connection with a particular BAC clone). In further embodiments, preferably excluded from the invention are the specific polynucleotide sequence(s) contained in the clones corresponding to at least one, two, three, four, five, ten, or more of the available material having the accession numbers identified in the sixth column of this Table (including for example, the actual sequence contained in an identified BAC clone).

[0018] Table 4 provides a key to the tissue/cell source identifier code disclosed in Table 1A, column 8. Column 1 provides the tissue/cell source identifier code disclosed in Table 1A, Column 8. Columns 2-5 provide a description of the tissue or cell source. Codes corresponding to diseased tissues are indicated in column 6 with the word “disease”. The use of the word “disease” in column 6 is non-limiting. The tissue or cell source may be specific (e.g. a neoplasm), or may be disease-associated (e.g., a tissue sample from a normal portion of a diseased organ). Furthermore, tissues and/or cells lacking the “disease” designation may still be derived from sources directly or indirectly involved in a disease state or disorder, and therefore may have a further utility in that disease state or disorder. In numerous cases where the tissue/cell source is a library, column 7 identifies the vector used to generate the library.

[0019] Table 5 provides a key to the OMIM reference identification numbers disclosed in Table 1A, column 10. OMIM reference identification numbers (Column 1) were derived from Online Mendelian Inheritance in Man (Online Mendelian Inheritance in Man, OMIM. McKusick-Nathans Institute for Genetic Medicine, Johns Hopkins University (Baltimore, Md.) and National Center for Biotechnology Information, National Library of Medicine, (Bethesda, Md.) 2000. World Wide Web URL: http://www.ncbi.nlm.nih.gov/omim/). Column 2 provides diseases associated with the cytologic band disclosed in Table 1A, column 9, as determined using the Morbid Map database.

[0020] Table 6 summarizes ATCC Deposits, Deposit dates, and ATCC designation numbers of deposits made with the ATCC in connection with the present application.

[0021] Table 7 shows the cDNA libraries sequenced, and ATCC designation numbers and vector information relating to these cDNA libraries.

[0022] Table 8 provides a physical characterization of clones encompassed by the invention. The first column provides the unique clone identifier, “Clone ID NO:Z”, for certain cDNA clones of the invention, as described in Table 1A. The second column provides the size of the cDNA insert contained in the corresponding cDNA clone.

[0023] Definitions

[0024] The following definitions are provided to facilitate understanding of certain terms used throughout this specification.

[0025] In the present invention, “isolated” refers to material removed from its original environment (e.g., the natural environment if it is naturally occurring), and thus is altered “by the hand of man” from its natural state. For example, an isolated polynucleotide could be part of a vector or a composition of matter, or could be contained within a cell, and still be “isolated” because that vector, composition of matter, or particular cell is not the original environment of the polynucleotide. The term “isolated” does not refer to genomic or cDNA libraries, whole cell total or mRNA preparations, genomic DNA preparations (including those separated by electrophoresis and transferred onto blots), sheared whole cell genomic DNA preparations or other compositions where the art demonstrates no distinguishing features of the polynucleotide/sequences of the present invention.

[0026] As used herein, a “polynucleotide” refers to a molecule having a nucleic acid sequence encoding SEQ ID NO:Y or a fragment or variant thereof; a nucleic acid sequence contained in SEQ ID NO:X (as described in column 3 of Table 1A) or the complement thereof; a cDNA sequence contained in Clone ID NO:Z (as described in column 2 of Table 1A and contained within a library deposited with the ATCC); a nucleotide sequence encoding the polypeptide encoded by a nucleotide sequence in SEQ ID NO:B as defined in column 6 of Table 1B or a fragment or variant thereof; or a nucleotide coding sequence in SEQ ID NO:B as defined in column 6 of Table 1B or the complement thereof. For example, the polynucleotide can contain the nucleotide sequence of the full length cDNA sequence, including the 5′ and 3′ untranslated sequences, the coding region, as well as fragments, epitopes, domains, and variants of the nucleic acid sequence. Moreover, as used herein, a “polypeptide” refers to a molecule having an amino acid sequence encoded by a polynucleotide of the invention as broadly defined (obviously excluding poly-Phenylalanine or poly-Lysine peptide sequences which result from translation of a polyA tail of a sequence corresponding to a cDNA).

[0027] In the present invention, “SEQ ID NO:X” was often generated by overlapping sequences contained in multiple clones (contig analysis). A representative clone containing all or most of the sequence for SEQ ID NO:X is deposited at Human Genome Sciences, Inc. (HGS) in a catalogued and archived library. As shown, for example, in column 2 of Table 1A, each clone is identified by a cDNA Clone ID (identifier generally referred to herein as Clone ID NO:Z). Each Clone ID is unique to an individual clone and the Clone ID is all the information needed to retrieve a given clone from the HGS library. Furthermore, certain clones disclosed in this application have been deposited with the ATCC on Oct. 5, 2000, having the ATCC designation numbers PTA 2574 and PTA 2575; and on Jan. 5, 2001, having the depositor reference numbers TS-1, TS-2, AC-1, and AC-2. In addition to the individual cDNA clone deposits, most of the cDNA libraries from which the clones were derived were deposited at the American Type Culture Collection (hereinafter “ATCC”). Table 7 provides a list of the deposited cDNA libraries. One can use the Clone ID NO:Z to determine the library source by reference to Tables 6 and 7. Table 7 lists the deposited cDNA libraries by name and links each library to an ATCC Deposit. Library names contain four characters, for example, “HTWE.” The name of a cDNA clone (Clone ID) isolated from that library begins with the same four characters, for example “HTWEP07”. As mentioned below, Table 1A correlates the Clone ID names with SEQ ID NO:X. Thus, starting with an SEQ ID NO:X, one can use Tables 1, 6 and 7 to determine the corresponding Clone ID, which library it came from and which ATCC deposit the library is contained in. Furthermore, it is possible to retrieve a given cDNA clone from the source library by techniques known in the art and described elsewhere herein. The ATCC is located at 10801 University Boulevard, Manassas, Va. 20110-2209, USA. The ATCC deposits were made pursuant to the terms of the Budapest Treaty on the international recognition of the deposit of microorganisms for the purposes of patent procedure.

[0028] In specific embodiments, the polynucleotides of the invention are at least 15, at least 30, at least 50, at least 100, at least 125, at least 500, or at least 1000 continuous nucleotides but are less than or equal to 300 kb, 200 kb, 100 kb, 50 kb, 15 kb, 10 kb, 7.5kb, 5 kb, 2.5 kb, 2.0 kb, or 1 kb, in length. In a further embodiment, polynucleotides of the invention comprise a portion of the coding sequences, as disclosed herein, but do not comprise all or a portion of any intron. In another embodiment, the polynucleotides comprising coding sequences do not contain coding sequences of a genomic flanking gene (i.e., 5′ or 3′ to the gene of interest in the genome). In other embodiments, the polynucleotides of the invention do not contain the coding sequence of more than 1000, 500, 250, 100, 50, 25, 20, 15, 10, 5, 4, 3, 2, or 1 genomic flanking gene(s).

[0029] A “polynucleotide” of the present invention also includes those polynucleotides capable of hybridizing, under stringent hybridization conditions, to sequences contained in SEQ ID NO:X, or the complement thereof (e.g., the complement of any one, two, three, four, or more of the polynucleotide fragments described herein), the polynucleotide sequence delineated in columns 8 and 9 of Table 2 or the complement thereof, and/or cDNA sequences contained in Clone ID NO:Z (e.g., the complement of any one, two, three, four, or more of the polynucleotide fragments, or the cDNA clone within the pool of cDNA clones deposited with the ATCC, described herein), and/or the polynucleotide sequence delineated in column 6 of Table 1B or the complement thereof. “Stringent hybridization conditions” refers to an overnight incubation at 42 degree C. in a solution comprising 50% formamide, 5× SSC (750 mM NaCl, 75 mM trisodium citrate), 50 mM sodium phosphate (pH 7.6), 5× Denhardt's solution, 10% dextran sulfate, and 20 μg/ml denatured, sheared salmon sperm DNA, followed by washing the filters in 0.1× SSC at about 65 degree C.

[0030] Also contemplated are nucleic acid molecules that hybridize to the polynucleotides of the present invention at lower stringency hybridization conditions. Changes in the stringency of hybridization and signal detection are primarily accomplished through the manipulation of formamide concentration (lower percentages of formamide result in lowered stringency); salt conditions, or temperature. For example, lower stringency conditions include an overnight incubation at 37 degree C. in a solution comprising 6× SSPE (20× SSPE=3M NaCl; 0.2M NaH₂PO₄; 0.02M EDTA, pH 7.4), 0.5% SDS, 30% formamide, 100 ug/ml salmon sperm blocking DNA; followed by washes at 50 degree C. with 1× SSPE, 0.1% SDS. In addition, to achieve even lower stringency, washes performed following stringent hybridization can be done at higher salt concentrations (e.g. 5× SSC).

[0031] Note that variations in the above conditions may be accomplished through the inclusion and/or substitution of alternate blocking reagents used to suppress background in hybridization experiments. Typical blocking reagents include Denhardt's reagent, BLOTTO, heparin, denatured salmon sperm DNA, and commercially available proprietary formulations. The inclusion of specific blocking reagents may require modification of the hybridization conditions described above, due to problems with compatibility.

[0032] Of course, a polynucleotide which hybridizes only to polyA+ sequences (such as any 3′ terminal polyA+ tract of a cDNA shown in the sequence listing), or to a complementary stretch of T (or U) residues, would not be included in the definition of “polynucleotide,” since such a polynucleotide would hybridize to any nucleic acid molecule containing a poly (A) stretch or the complement thereof (e.g., practically any double-stranded cDNA clone generated using oligo dT as a primer).

[0033] The polynucleotide of the present invention can be composed of any polyribonucleotide or polydeoxribonucleotide, which may be unmodified RNA or DNA or modified RNA or DNA. For example, polynucleotides can be composed of single- and double-stranded DNA, DNA that is a mixture of single- and double-stranded regions, single- and double-stranded RNA, and RNA that is mixture of single- and double-stranded regions, hybrid molecules comprising DNA and RNA that may be single-stranded or, more typically, double-stranded or a mixture of single- and double-stranded regions. In addition, the polynucleotide can be composed of triple-stranded regions comprising RNA or DNA or both RNA and DNA. A polynucleotide may also contain one or more modified bases or DNA or RNA backbones modified for stability or for other reasons. “Modified” bases include, for example, tritylated bases and unusual bases such as inosine. A variety of modifications can be made to DNA and RNA; thus, “polynucleotide” embraces chemically, enzymatically, or metabolically modified forms.

[0034] The polypeptide of the present invention can be composed of amino acids joined to each other by peptide bonds or modified peptide bonds, i.e., peptide isosteres, and may contain amino acids other than the 20 gene-encoded amino acids. The polypeptides may be modified by either natural processes, such as posttranslational processing, or by chemical modification techniques which are well known in the art. Such modifications are well described in basic texts and in more detailed monographs, as well as in a voluminous research literature. Modifications can occur anywhere in a polypeptide, including the peptide backbone, the amino acid side-chains and the amino or carboxyl termini. It will be appreciated that the same type of modification may be present in the same or varying degrees at several sites in a given polypeptide. Also, a given polypeptide may contain many types of modifications. Polypeptides may be branched, for example, as a result of ubiquitination, and they may be cyclic, with or without branching. Cyclic, branched, and branched cyclic polypeptides may result from posttranslation natural processes or may be made by synthetic methods. Modifications include acetylation, acylation, ADP-ribosylation, amidation, covalent attachment of flavin, covalent attachment of a heme moiety, covalent attachment of a nucleotide or nucleotide derivative, covalent attachment of a lipid or lipid derivative, covalent attachment of phosphotidylinositol, cross-linking, cyclization, disulfide bond formation, demethylation, formation of covalent cross-links, formation of cysteine, formation of pyroglutamate, formylation, gamma-carboxylation, glycosylation, GPI anchor formation, hydroxylation, iodination, methylation, myristoylation, oxidation, pegylation, proteolytic processing, phosphorylation, prenylation, racemization, selenoylation, sulfation, transfer-RNA mediated addition of amino acids to proteins such as arginylation, and ubiquitination. (See, for instance, PROTEINS—STRUCTURE AND MOLECULAR PROPERTIES, 2nd Ed., T. E. Creighton, W. H. Freeman and Company, New York (1993); POSTTRANSLATIONAL COVALENT MODIFICATION OF PROTEINS, B. C. Johnson, Ed., Academic Press, New York, pgs. 1-12 (1983); Seifter et al., Meth. Enzymol. 182:626-646 (1990); Rattan et al., Ann. N.Y. Acad. Sci. 663:48-62 (1992)).

[0035] “SEQ ID NO:X” refers to a polynucleotide sequence described, for example, in Tables 1A or 2, while “SEQ ID NO:Y” refers to a polypeptide sequence described in column 6 of Table 1A. SEQ ID NO:X is identified by an integer specified in column 4 of Table 1A. The polypeptide sequence SEQ ID NO:Y is a translated open reading frame (ORF) encoded by polynucleotide SEQ ID NO:X. “Clone ID NO:Z” refers to a cDNA clone described in column 2 of Table 1A.

[0036] “A polypeptide having functional activity” refers to a polypeptide capable of displaying one or more known functional activities associated with a full-length (complete) protein. Such functional activities include, but are not limited to, biological activity, antigenicity [ability to bind (or compete with a polypeptide for binding) to an anti-polypeptide antibody], immunogenicity (ability to generate antibody which binds to a specific polypeptide of the invention), ability to form multimers with polypeptides of the invention, and ability to bind to a receptor or ligand for a polypeptide.

[0037] The polypeptides of the invention can be assayed for functional activity (e.g. biological activity) using or routinely modifying assays known in the art, as well as assays described herein. Specifically, one of skill in the art may routinely assay inflammation-associated polypeptides (including fragments and variants) of the invention for activity using assays as described in Examples 29, 43, and 45.

[0038] “A polypeptide having biological activity” refers to a polypeptide exhibiting activity similar to, but not necessarily identical to, an activity of a polypeptide of the present invention, including mature forms, as measured in a particular biological assay, with or without dose dependency. In the case where dose dependency does exist, it need not be identical to that of the polypeptide, but rather substantially similar to the dose-dependence in a given activity as compared to the polypeptide of the present invention (i.e., the candidate polypeptide will exhibit greater activity or not more than about 25-fold less and, preferably, not more than about tenfold less activity, and most preferably, not more than about three-fold less activity relative to the polypeptide of the present invention).

[0039] Table 1A summarizes some of the polynucleotides encompassed by the invention (including contig sequences (SEQ ID NO:X) and clones (Clone ID NO:Z) and further summarizes certain characteristics of these polynucleotides and the polypeptides encoded thereby.

TABLE 1A
Polynucleotides and Polypeptides of the Invention

| | | | | | AA | | Tissue Distribution | | |
|---|---|---|---|---|---|---|---|---|---|
| | | | | | SEQ | | Library code: count | | OMIM |
| Gene | Clone ID | Contig | SEQ ID | ORF | ID | | (see Table IV for | Cytologic | Disease |
| No: | NO: Z | ID | NO: X | (From-To) | NO: Y | Predicted Epitopes | Library Codes) | Band | Reference(s): |
| 1 | HNHAM52 | 1128030 | 11 | 173-349 | 431 | Ala-43 to Gln-50. | AR061: 2, AR089: 1 | | |
| | | | | | | | H0457: 1, H0674: 1, | | |
| | | | | | | | L0803: 1, S0053: 1, | | |
| | | | | | | | L0756: 1 and L0592: 1. | | |
| | | 457010 | 268 | 12-131 | 688 | Arg-1 to Asp-6, | | | |
| | | | | | | Glu-26 to Ser-33. | | | |
| 2 | HMMAB49 | 1126302 | 12 | 423-121 | 432 | Lys-8 to Ser-13, | AR089: 53, AR061: 4 | | |
| | | | | | | Lys-52 to Ser-69, | H0444: 2 | | |
| | | | | | | Cys-87 to His-93. | | | |
| | | 462502 | 269 | 1-204 | 689 | | | | |
| 3 | HRDBT72 | 1127562 | 13 | 263-592 | 433 | Ser-2 to Ala-8, | AR089: 49, ARO61: 16 | | |
| | | | | | | Gln-23 to Glu-28. | H0124: 3 | | |
| | | 507847 | 270 | 226-354 | 690 | | | | |
| 4 | HE2FR50 | 1127466 | 14 | 37-369 | 434 | Val-105 to Arg-111. | AR061: 10, AR089: 3 | | |
| | | | | | | | L0659: 3, L0766: 2, | | |
| | | | | | | | S0330: 2, L0731: 2, | | |
| | | | | | | | L0758: 2, H0171: 1, | | |
| | | | | | | | H0650: 1, S0356: 1, | | |
| | | | | | | | H0675: 1, S0182: 1, | | |
| | | | | | | | H0184: 1, H0009: 1, | | |
| | | | | | | | H0039: 1, H0038: 1, | | |
| | | | | | | | H0560: 1, L0770: 1, | | |
| | | | | | | | L0637: 1, L0655: 1, | | |
| | | | | | | | L0666: 1, H0659: 1, | | |
| | | | | | | | S0328: 1, H0518: 1, | | |
| | | | | | | | H0521: 1, L0752: 1, | | |
| | | | | | | | S0260: 1, and L0588: 1. | | |
| | | 508498 | 271 | 50-391 | 691 | | | | |
| 5 | HLHDR39 | 1124659 | 15 | 269-472 | 435 | | AR061: 7, AR089: 3 | | |
| | | | | | | | H0024: 2 | | |
| | | 523499 | 272 | 238-438 | 692 | | | | |
| 6 | HSIDS82 | 1178550 | 16 | 12-332 | 436 | | AR061: 6, AR089: 3 | | |
| | | | | | | | H0036: 2, H0619: 1 | | |
| | | | | | | | H0050: 1 and L0792: 1. | | |
| | | 531248 | 273 | 146-301 | 693 | His-28 to Gln-36. | | | |
| 7 | HSICX21 | 1227079 | 17 | 935-588 | 437 | Gly-15 to Leu-24, | AR089: 2, AR061: 0 | | |
| | | | | | | Glu-60 to Tyr-66. | H0036: 2 | | |
| | | 531267 | 274 | 223-378 | 694 | Asn-5 to His-12. | | | |
| 8 | HCDAJ15 | 1136116 | 18 | 841-584 | 438 | Pro-35 to Asn-41. | AR089: 8, AR061: 8 | | |
| | | | | | | | H0251: 2 and S0392: 1. | | |
| | | 557243 | 275 | 2-190 | 695 | | | | |
| 9 | HSNAH21 | 1200487 | 19 | 184-53 | 439 | | AR061: 3, AR089: 1 | | |
| | | | | | | | L0659: 7, L0777: 7, | | |
| | | | | | | | S0358: 6, H0486: 6, | | |
| | | | | | | | H0622: 6, S0360: 4, | | |
| | | | | | | | L0662: 4, H0013: 3, | | |
| | | | | | | | H0144: 3, S0328: 3, | | |
| | | | | | | | L0751: 3, L0731: 3, | | |
| | | | | | | | H0624: 2, H0619: 2, | | |
| | | | | | | | H0328: 2, H0163: 2, | | |
| | | | | | | | L0520: 2, L0764: 2, | | |
| | | | | | | | L0747: 2, S0116: 1, | | |
| | | | | | | | S0356: 1, S0376: 1, | | |
| | | | | | | | H0431: 1, H0600: 1, | | |
| | | | | | | | H0632: 1, H0244: 1, | | |
| | | | | | | | H0599: 1, H0123: 1, | | |
| | | | | | | | H0050: 1, H0051: 1, | | |
| | | | | | | | S0250: 1, H0688: 1, | | |
| | | | | | | | H0039: 1, H0090: 1, | | |
| | | | | | | | H0591: 1, H0040: 1, | | |
| | | | | | | | H0102: 1, S0150: 1, | | |
| | | | | | | | H0647: 1, H0646: 1, | | |
| | | | | | | | L0640: 1, L0763: 1, | | |
| | | | | | | | L0768: 1, L0649: 1, | | |
| | | | | | | | L0806: 1, L0793: 1, | | |
| | | | | | | | L0666: 1, H0690: 1, | | |
| | | | | | | | H0684: 1, H0658: 1, | | |
| | | | | | | | H0648: 1, L0779: 1, | | |
| | | | | | | | L0780: 1, L0759: 1 and | | |
| | | | | | | | S0011: 1. | | |
| | | 571314 | 276 | 64-249 | 696 | Ser-2 to Arg-7, | | | |
| | | | | | | Arg-22 to Pro-28. | | | |
| 10 | HBZSH19 | 1219963 | 20 | 468-211 | 440 | Gly-1 to Gly-15, | AR089: 1, AR061: 0 | | |
| | | | | | | Thr-69 to Asn-78. | S0007: 2, H0661: 1, | | |
| | | | | | | | L0371: 1, L0764: 1, | | |
| | | | | | | | L0662: 1, L0387: 1, | | |
| | | | | | | | S0190: 1, S3012: 1, | | |
| | | | | | | | L0777: 1 and L0595: 1. | | |
| | | 578224 | 277 | 2-319 | 697 | Lys-25 to Gly-35, | | | |
| | | | | | | Thr-89 to Asn-98. | | | |
| 11 | HWBCQ57 | 1128604 | 21 | 801-49 | 441 | Leu-8 to Arg-15, | AR089: 4, AR061: 4 | | |
| | | | | | | Glu-22 to Gly-29, | H0521: 93, H0522: 21, | | |
| | | | | | | Ser-72 to Glu-78, | H0580: 17, L0655: 17, | | |
| | | | | | | Cys-109 to Asp-117, | H0445: 14, H0638: 13, | | |
| | | | | | | Cys-131 to His-138, | H0656: 9, S0358: 7, | | |
| | | | | | | His-238 to Gln-248. | H0090: 7, L0775: 7, | | |
| | | | | | | | L0599: 7, H0657: 6, | | |
| | | | | | | | H0486: 6, H0583: 5, | | |
| | | | | | | | H0125: 5, H0575: 5, | | |
| | | | | | | | H0050: 5, H0264: 5, | | |
| | | | | | | | H0581: 4, H0634: 4, | | |
| | | | | | | | H0561: 4, H0134: 4, | | |
| | | | | | | | L0750: 4, L0777: 4, | | |
| | | | | | | | L0362: 4, S0360: 3, | | |
| | | | | | | | H0637: 3, H0427: 3, | | |
| | | | | | | | H0591: 3, H0648: 3, | | |
| | | | | | | | H0518: 3, L0745: 3, | | |
| | | | | | | | L0731: 3, H0650: 2, | | |
| | | | | | | | S0376: 2, H0586: 2, | | |
| | | | | | | | H0069: 2, H0635: 2, | | |
| | | | | | | | H0318: 2, H0086: 2, | | |
| | | | | | | | H0063: 2, H0488: 2, | | |
| | | | | | | | H0560: 2, H0641: 2, | | |
| | | | | | | | H0646: 2, L0764: 2, | | |
| | | | | | | | L0649: 2, L0774: 2, | | |
| | | | | | | | L0776: 2, L0783: 2, | | |
| | | | | | | | L0664: 2, H0660: 2, | | |
| | | | | | | | L0744: 2, L0748: 2, | | |
| | | | | | | | L0754: 2, L0747: 2, | | |
| | | | | | | | L0749: 2, L0752: 2, | | |
| | | | | | | | L0755: 2, H0556: 1, | | |
| | | | | | | | H0402: 1, S0444: 1, | | |
| | | | | | | | H0676: 1, H0619: 1, | | |
| | | | | | | | H0393: 1, H0549: 1, | | |
| | | | | | | | H0431: 1, H0391: 1, | | |
| | | | | | | | H0592: 1, H0574: 1, | | |
| | | | | | | | H0250: 1, H0042: 1, | | |
| | | | | | | | H0004: 1, H0421: 1, | | |
| | | | | | | | H0150: 1, H0242: 1, | | |
| | | | | | | | H0109: 1, H0252: 1, | | |
| | | | | | | | T0023: 1, T0086: 1, | | |
| | | | | | | | H0031: 1, H0673: 1, | | |
| | | | | | | | H0124: 1, H0376: 1, | | |
| | | | | | | | H0316: 1, H0087: 1, | | |
| | | | | | | | T0067: 1, H0647: 1, | | |
| | | | | | | | S0002: 1, S0426: 1, | | |
| | | | | | | | L0769: 1, L0761: 1, | | |
| | | | | | | | L0372: 1, L0767: 1, | | |
| | | | | | | | L0768: 1, L0805: 1, | | |
| | | | | | | | L0653: 1, L0659: 1, | | |
| | | | | | | | L0782: 1, L0384: 1, | | |
| | | | | | | | L0788: 1, L0666: 1, | | |
| | | | | | | | L0663: 1, H0689: 1, | | |
| | | | | | | | H0682: 1, H0658: 1, | | |
| | | | | | | | H0670: 1, S0328: 1, | | |
| | | | | | | | S0330: 1, H0539: 1, | | |
| | | | | | | | S0146: 1, L0751: 1, | | |
| | | | | | | | L0779: 1, S0260: 1, | | |
| | | | | | | | S0308: 1, L0581: 1, | | |
| | | | | | | | H0677: 1, S0384: 1 and | | |
| | | | | | | | H0506: 1. | | |
| | | 590758 | 278 | 282-578 | 698 | | | | |
| 12 | HCFAT05 | 592118 | 22 | 2-490 | 442 | Arg-1 to His-11, | AR061: 1, AR089: 1 | | |
| | | | | | | Ser-18 to Gly-27, | H0556: 2, H0634: 1, | | |
| | | | | | | Gly-36 to Gly-44, | L0766: 1 and H0422: 1. | | |
| | | | | | | Asp-97 to Phe-103, | | | |
| | | | | | | Pro-127 to Gly-132. | | | |
| 13 | HMWIN49 | 1195465 | 23 | 248-3 | 443 | AR089: 6, AR061: 4 | | | |
| | | | | | | | S0007: 3, H0125: 2, | | |
| | | | | | | | H0486: 2, H0040: 2, | | |
| | | | | | | | L0774: 2, S0126: 2, | | |
| | | | | | | | H0341: 1, S0410: 1, | | |
| | | | | | | | S0045: 1, S0300: 1, | | |
| | | | | | | | H0431: 1, T0039: 1, | | |
| | | | | | | | T0060: 1, H0318: 1, | | |
| | | | | | | | H0596: 1, H0530: 1, | | |
| | | | | | | | H0081: 1, H0266: 1, | | |
| | | | | | | | H0068: 1, H0163: 1, | | |
| | | | | | | | H0063: 1, H0087: 1, | | |
| | | | | | | | S0372: 1, S0344: 1, | | |
| | | | | | | | L0763: 1, L0500: 1, | | |
| | | | | | | | L0775: 1, L0783: 1, | | |
| | | | | | | | H0593: 1, S0292: 1, | | |
| | | | | | | | H0648: 1, H0215: 1, | | |
| | | | | | | | H0631: 1, L0681: 1, | | |
| | | | | | | | S0026: 1, H0136: 1, | | |
| | | | | | | | H0216: 1 and H0542: 1. | | |
| | | 615238 | 279 | 25-315 | 699 | Val-1 to Arg-11, | | | |
| | | | | | | Glu-27 to Asn-32, | | | |
| | | | | | | Glu-74 to Gln-82, | | | |
| | | | | | | Ser-86 to Trp-92. | | | |
| 14 | HOECV83 | 1126321 | 24 | 34-210 | 444 | Val-11 to Leu-16. | AR061: 3, AR089: 2 | | |
| | | | | | | | S0354: 2, L0438: 2, | | |
| | | | | | | | L0780: 2, L0586: 1, | | |
| | | | | | | | H0581: 1, H0052: 1, | | |
| | | | | | | | H0009: 1, L0471: 1, | | |
| | | | | | | | L0179: 1, S0003: 1, | | |
| | | | | | | | L0055: 1, L0655: 1, | | |
| | | | | | | | L0526: 1, S0126: 1, | | |
| | | | | | | | H0521: 1 and S0424: 1. | | |
| | | 653276 | 280 | 198-389 | 700 | | | | |
| 15 | HWACV74 | 1165236 | 25 | 1627-1403 | 445 | Gln-40 to His-48, | AR089: 2, AR061: 1 | | |
| | | | | | | Tyr-56 to Trp-63. | H0581: 2, H0657: 1, | | |
| | | | | | | | S0358: 1, S0046: 1, | | |
| | | | | | | | S0222: 1, H0486: 1, | | |
| | | | | | | | H0551: 1, L0761: 1, | | |
| | | | | | | | L0766: 1, L0774: 1, | | |
| | | | | | | | L0659: 1, L0666: 1, | | |
| | | | | | | | L0664: 1 and H0435: 1. | | |
| | | 662347 | 281 | 162-341 | 701 | Ser-26 to Ser-33. | | | |
| 16 | HCHMV63 | 1194831 | 26 | 817-2 | 446 | Gly-1 to Trp-6, | AR089: 2, AR061: 1 | | |
| | | | | | | Pro-9 to Asp-18, | S0412: 12, L0758: 5, | | |
| | | | | | | Val-56 to Thr-66, | L0743: 4, L0748: 4, | | |
| | | | | | | Pro-73 to Trp-79, | H0545: 3, L0769: 3, | | |
| | | | | | | Ala-82 to Trp-102, | L0665: 3, H0341: 2, | | |
| | | | | | | Gln-108 to Cys-119, | S0360: 2, H0457: 2, | | |
| | | | | | | Ser-145 to Arg-166, | H0644: 2, H0032: 2, | | |
| | | | | | | Arg-239 to Asn-247, | S0144: 2, L0762: 2, | | |
| | | | | | | | L0766: 2, L0774: 2, | | |
| | | | | | | | L0530: 2, H0436: 2, | | |
| | | | | | | | L0747: 2, L0759: 2, | | |
| | | | | | | | L0581: 2, H0352: 2, | | |
| | | | | | | | H0657: 1, H0656: 1, | | |
| | | | | | | | S0282: 1, H0484: 1, | | |
| | | | | | | | H0663: 1, S0358: 1, | | |
| | | | | | | | H0370: 1, L0586: 1, | | |
| | | | | | | | H0013: 1, S0010: 1, | | |
| | | | | | | | H0596: 1, H0594: 1, | | |
| | | | | | | | H0606: 1, H0135: 1, | | |
| | | | | | | | H0090: 1, H0616: 1, | | |
| | | | | | | | H0641: 1, H0633: 1, | | |
| | | | | | | | L0770: 1, L0771: 1, | | |
| | | | | | | | L0662: 1, L0767: 1, | | |
| | | | | | | | L0768: 1, L0803: 1, | | |
| | | | | | | | L0805: 1, L0509: 1, | | |
| | | | | | | | L0653: 1, L0515: 1, | | |
| | | | | | | | L0659: 1, H0520: 1, | | |
| | | | | | | | H0435: 1, H0659: 1, | | |
| | | | | | | | H0521: 1, H0696: 1, | | |
| | | | | | | | S3014: 1, S0027: 1, | | |
| | | | | | | | L0439: 1, L0740: 1, | | |
| | | | | | | | L0749: 1, L0756: 1, | | |
| | | | | | | | S0260: 1 and H0423: 1. | | |
| | | 666798 | 282 | 2-262 | 702 | His-48 to Thr-54. | | | |
| 16 | HCWKB72 | 1194055 | 27 | 575-327 | 447 | Ile-28 to Asn-42. | AR061: 2, AR089: 2 | | |
| | | | | | | | H0305: 4, H0266: 3, | | |
| | | | | | | | H0624: 2, H0618: 2, | | |
| | | | | | | | S0036: 2, H0040: 2, | | |
| | | | | | | | T0041: 2, L0749: 2, | | |
| | | | | | | | L0777: 2, H0265: 1, | | |
| | | | | | | | H0556: 1, S0134: 1, | | |
| | | | | | | | H0013: 1, H0069: 1, | | |
| | | | | | | | H0599: 1, H0575: 1, | | |
| | | | | | | | H0421: 1, T0110: 1, | | |
| | | | | | | | H0188: 1, H0428: 1, | | |
| | | | | | | | H0135: 1, H0634: 1, | | |
| | | | | | | | H0488: 1, H0556: 1, | | |
| | | | | | | | H0623: 1, S0038: 1, | | |
| | | | | | | | S0386: 1, H0100: 1, | | |
| | | | | | | | T0042: 1, L0766: 1, | | |
| | | | | | | | H0521: 1, H0522: 1, | | |
| | | | | | | | H0436: 1, S3014: 1, | | |
| | | | | | | | S0027: 1, L0779: 1, | | |
| | | | | | | | S0260: 1, L0588: 1, | | |
| | | | | | | | L0366: 1 and L0462: 1. | | |
| | | 676007 | 283 | 101-93 | 703 | | | | |
| 18 | HFPCT53 | 1162396 | 28 | 284-63 | 448 | Pro-67 to Phe-72. | AR089: 1, AR061: 0 | | |
| | | | | | | | S0222: 1 and L0439: 1. | | |
| | | 678892 | 284 | 190-351 | 704 | Glu-27 to Leu-39. | | | |
| 19 | HDTBW62 | 1222829 | 29 | 2-1564 | 449 | Thr-1 to Phe-7, | AR061: 2, AR089: 2 | | |
| | | | | | | Asp-10 to Ser-23, | S0358: 3, H0591: 3, | | |
| | | | | | | Pro-29 to Leu-37, | L0439: 3, H0486: 2, | | |
| | | | | | | Arg-95 to His-102, | L0659: 2, H0542: 2, | | |
| | | | | | | Pro-132 to Lys-137, | H0171: 1, H0583: 1, | | |
| | | | | | | Met-174 to Phe-179, | H0663: 1, S0356: 1, | | |
| | | | | | | Leu-183 to Trp-189, | S0360: 1, S0045: 1, | | |
| | | | | | | Ser-206 to Lys-212, | S6026: 1, H0431: 1, | | |
| | | | | | | Asp-215 to Val-222, | H0331: 1, H0036: 1, | | |
| | | | | | | Leu-352 to His-367, | S0346: 1, S0474: 1, | | |
| | | | | | | Pro-373 to Glu-384, | H0581: 1, H0046: 1, | | |
| | | | | | | Ser-412 to Gly-427, | H0572: 1, H0024: 1, | | |
| | | | | | | Thr-448 to Ser-457, | H0014: 1, H0266: 1, | | |
| | | | | | | Thr-499 to Asp-505. | H0615: 1, H0616: 1, | | |
| | | | | | | | H0100: 1, H0641: 1, | | |
| | | | | | | | L0763: 1, L0638: 1, | | |
| | | | | | | | L0771: 1, L0662: 1, | | |
| | | | | | | | L0803: 1, L0775: 1, | | |
| | | | | | | | L0653: 1, L0661: 1, | | |
| | | | | | | | L0657: 1, L0809: 1, | | |
| | | | | | | | L0519: 1, L0666: 1, | | |
| | | | | | | | L0665: 1, L0438: 1, | | |
| | | | | | | | H0520: 1, H0519: 1, | | |
| | | | | | | | H0658: 1, H0648: 1, | | |
| | | | | | | | L0744: 1, L0748: 1, | | |
| | | | | | | | L0777: 1, L0758: 1, | | |
| | | | | | | | L0595: 1, H0136: 1 and | | |
| | | | | | | | H0423: 1. | | |
| | | 681324 | 285 | 6-211 | 705 | | | | |
| 20 | HEFMB30 | 1037295 | 30 | 65-235 | 450 | AR061: 1, AR089: 0 | | | |
| | | | | | | | L0804: 2, S0402: 1, | | |
| | | | | | | | H0648: 1, L0748: 1 and | | |
| | | | | | | | L0749: 1. | | |
| | | 691516 | 286 | 51-221 | 706 | | | | |
| 21 | HMSKF13 | 708207 | 31 | 2-400 | 451 | Arg-1 to Leu-7. | S0002: 1, H0134: 1 and | | |
| | | | | | | | L0596: 1. | | |
| 22 | HAHDI40 | 710790 | 32 | 144-656 | 452 | Lys-1 to Thr-19, | AR089: 4, AR061: 2 | | |
| | | | | | | Lys-30 to Thr-42, | L0803: 4, L0794: 3, | | |
| | | | | | | Asp-55 to Tyr-64. | L0747: 3, H0599: 2, | | |
| | | | | | | | L0659: 2, L0789: 2, | | |
| | | | | | | | S0364: 1, L0804: 1, | | |
| | | | | | | | H0539: 1, L0720: 1 and | | |
| | | | | | | | S0031: 1. | | |
| 23 | HAPOR59 | 1133414 | 33 | 3-368 | 453 | Ala-4 to Glu-11, | AR089: 29, AR061: 9 | | |
| | | | | | | Lys-62 to Arg-71. | H0575: 1 and H0083: 1. | | |
| | | 712955 | 287 | 3-368 | 707 | Ala-4 to Glu-11, | | | |
| | | | | | | Lys-62 to Arg-71. | | | |
| 24 | HFCAG94 | 1126368 | 34 | 1000-668 | 454 | Gly-23 to Ser-30, | AR089: 16, AR061: 7 | | |
| | | | | | | Ser-70 to Gln-78. | H0009: 1 and H0520: 1. | | |
| | | 735763 | 288 | 82-180 | 708 | | | | |
| 25 | HSPAB58 | 1124746 | 35 | 321-524 | 455 | Ile-2 to His-9. | AR089: 1, AR061: 0 | | |
| | | | | | | | H0478: 1, L0748: 1 | | |
| | | | | | | | and L0749: 1. | | |
| | | 736098 | 289 | 3-116 | 709 | Ser-20 to Tyr-25. | | | |
| 26 | HLHCT68 | 764745 | 36 | 44-217 | 456 | | AR061: 7, AR089: 6 | | |
| | | | | | | | L0748: 2 and H0024: 1. | | |
| 27 | HBIBF78 | 1127991 | 37 | 413-682 | 457 | | AR061: 6, AR089: 3 | | |
| | | | | | | | S0049: 1 and L0439: 1. | | |
| | | 772797 | 290 | 45-206 | 710 | Lys-42 to Ser-49. | | | |
| 28 | HLJDQ79 | 1127472 | 38 | 2-256 | 458 | | AR089: 5, AR061: 2 | | |
| | | | | | | | L0439: 11, L0752: 7, | | |
| | | | | | | | L0777: 6, H0046: 4, | | |
| | | | | | | | L0471: 4, L0771: 4, | | |
| | | | | | | | L0749: 4, L0731: 4, | | |
| | | | | | | | L0757: 4, H0156: 3, | | |
| | | | | | | | S0010: 3, L0598: 3, | | |
| | | | | | | | L0774: 3, L0775: 3, | | |
| | | | | | | | L0776: 3, S0126: 3, | | |
| | | | | | | | L0750: 3, L0758: 3, | | |
| | | | | | | | L0785: 2, S0360: 2, | | |
| | | | | | | | S0046: 2, H0415: 2, | | |
| | | | | | | | H0596: 2, T0115: 2, | | |
| | | | | | | | H0428: 2, H0494: 2, | | |
| | | | | | | | S0422: 2, L0662: 2, | | |
| | | | | | | | L0804: 2, H0519: 2, | | |
| | | | | | | | L0748: 2, L0740: 2, | | |
| | | | | | | | L0756: 2, L0592: 2, | | |
| | | | | | | | L0599: 2, S0212: 1, | | |
| | | | | | | | H0459: 1, H0638: 1, | | |
| | | | | | | | S0420: 1, H0619: 1, | | |
| | | | | | | | H0393: 1, S0300: 1, | | |
| | | | | | | | H0431: 1, H0455: 1, | | |
| | | | | | | | H0587: 1, H0497: 1, | | |
| | | | | | | | H0574: 1, H0013: 1, | | |
| | | | | | | | S0346: 1, L0106: 1, | | |
| | | | | | | | H0263: 1, H0327: 1, | | |
| | | | | | | | H0024: 1, H0051: 1, | | |
| | | | | | | | S0388: 1, H0083: 1, | | |
| | | | | | | | H0239: 1, H0355: 1, | | |
| | | | | | | | H0375: 1, H0622: 1, | | |
| | | | | | | | L0483: 1, H0628: 1, | | |
| | | | | | | | H0598: 1, S0036: 1, | | |
| | | | | | | | H0135: 1, H0634: 1, | | |
| | | | | | | | T0067: 1, H0379: 1, | | |
| | | | | | | | H0272: 1, H0056: 1, | | |
| | | | | | | | H0561: 1, S0464: 1, | | |
| | | | | | | | UNKWN: 1, L0763: 1, | | |
| | | | | | | | L0638: 1, L0637: 1, | | |
| | | | | | | | L0772: 1, L0372: 1, | | |
| | | | | | | | L0764: 1, L0521: 1, | | |
| | | | | | | | L0375: 1, L0806: 1, | | |
| | | | | | | | L0653: 1, L0655: 1, | | |
| | | | | | | | L0657: 1, L0659: 1, | | |
| | | | | | | | L0545: 1, L0528: 1, | | |
| | | | | | | | L0666: 1, L0663: 1, | | |
| | | | | | | | H0144: 1, H0702: 1, | | |
| | | | | | | | S0374: 1, H0520: 1, | | |
| | | | | | | | H0689: 1, H0648: 1, | | |
| | | | | | | | H0539: 1, S0152: 1, | | |
| | | | | | | | S0432: 1, L0754: 1, | | |
| | | | | | | | L0779: 1, L0755: 1, | | |
| | | | | | | | L0596: 1, L0588: 1, | | |
| | | | | | | | L0362: 1, H0667: 1, | | |
| | | | | | | | H0423: 1 and H0352: 1. | | |
| | | 774667 | 291 | 2-292 | 711 | Arg-1 to Val-11. | | | |
| 29 | HNHEQ86 | 785580 | 39 | 1-129 | 459 | | AR061: 9, AR089: 0 | | |
| | | | | | | | S6024: 1, S0001: 1, | | |
| | | | | | | | S0053: 1, S0216: 1, | | |
| | | | | | | | S0028: 1 and S0260: 1. | | |
| 30 | HWAAE95 | 1134932 | 40 | 700-1269 | 460 | Thr-16 to Gly-22, | AR089: 9, AR061: 2 | | |
| | | | | | | Pro-34 to Ser-46, | H0255: 1, H0318: 1, | | |
| | | | | | | Arg-79 to Gly-100, | H0581: 1 and S0250: 1. | | |
| | | | | | | Gln-116 to Val-123, | | | |
| | | | | | | Leu-153 to Ser-161. | | | |
| | | 789051 | 292 | 3-224 | 712 | Trp-2 to Gly-10, | | | |
| | | | | | | Phe-23 to Arg-36. | | | |
| 31 | HLMAC70 | 1127690 | 41 | 524-108 | 461 | Ser-1 to Gln-6, | AR061: 9, AR089: 3 | | |
| | | | | | | Leu-24 to Ile-36, | H0254: 3, H0543: 2, | | |
| | | | | | | Leu-38 to Pro-52, | H0255: 1, H0589: 1, | | |
| | | | | | | Ser-67 to Phe-88, | H0614: 1, H0050: 1, | | |
| | | | | | | Ala-92 to Thr-104. | L0607: 1, L0663: 1 and | | |
| | | | | | | | H0539: 1. | | |
| | | 795928 | 293 | 1-246 | 713 | Thr-18 to Thr-33. | | | |
| 32 | HTLAQ18 | 811792 | 42 | 2-493 | 462 | Ala-1 to Glu-11. | AR061: 11, AR089: 6 | | |
| | | | | | | | L0779: 3, L0758: 3, | | |
| | | | | | | | H0618: 2, H0253: 1, | | |
| | | | | | | | H0009: 1 and H0012: 1. | | |
| 33 | HTOIA82 | 844319 | 43 | 41-286 | 463 | Arg-44 to Gly-59. | AR061: 4, AR089: 2 | | |
| | | | | | | | H0264: 1 and L0754: 1. | | |
| 34 | HUVHP54 | 1199609 | 44 | 276-1019 | 464 | Glu-86 to Asp-93, | AR061: 7, AR089: 7 | | |
| | | | | | | Trp-100 to Asp-110, | S0358: 5, H0590: 2, | | |
| | | | | | | Asp-163 to Asn-172, | H0623: 2, L0803: 2, | | |
| | | | | | | Arg-220 to Cys-225, | S0152: 2, S3014: 2, | | |
| | | | | | | Pro-227 to Arg-237. | L0754: 2, H0458: 1, | | |
| | | | | | | | S0354: 1, H0549: 1, | | |
| | | | | | | | H0431: 1, H0497: 1, | | |
| | | | | | | | H0042: 1, H0036: 1, | | |
| | | | | | | | H0581: 1, H0196: 1, | | |
| | | | | | | | T0115: 1, H0024: 1, | | |
| | | | | | | | H0275: 1, H0622: 1, | | |
| | | | | | | | S0364: 1, H0124: 1, | | |
| | | | | | | | H0056: 1, H0429: 1, | | |
| | | | | | | | S0150: 1, L0640: 1, | | |
| | | | | | | | L0642: 1, L0804: 1, | | |
| | | | | | | | L0666: 1, S0330: 1, | | |
| | | | | | | | H0478: 1, S0027: 1, | | |
| | | | | | | | S0206: 1, L0592: 1, | | |
| | | | | | | | L0604: 1 and S0424: 1. | | |
| | | 849278 | 294 | 258-1001 | 714 | Glu-86 to Asp-93, | | | |
| | | | | | | Trp-100 to Asp-110, | | | |
| | | | | | | Asp-163 to Asn-172. | | | |
| 35 | HEOPE58 | 851009 | 45 | 257-421 | 465 | Phe-28 to Val-36, | AR089: 1, AR061: 0 | | |
| | | | | | | Phe-44 to Pro-49. | | | |
| 36 | HE8AE26 | 1136129 | 46 | 180-446 | 466 | | AR089: 11, AR061: 10 | | |
| | | | | | | | H0013: 2 and H0427: 1. | | |
| | | 851514 | 295 | 34-210 | 715 | | | | |
| 37 | HHFOO84 | 857780 | 47 | 78-275 | 467 | | AR089: 7, AR061: 4 | | |
| | | | | | | | S0344: 3, H0539: 2, | | |
| | | | | | | | L0758: 2, H0685: 1, | | |
| | | | | | | | H0657: 1, H0656: 1, | | |
| | | | | | | | S0116: 1, H0341: 1, | | |
| | | | | | | | H0645: 1, H0549: 1, | | |
| | | | | | | | H0331: 1, H0574: 1, | | |
| | | | | | | | T0039: 1, H0318: 1, | | |
| | | | | | | | H0050: 1, H0135: 1, | | |
| | | | | | | | H0641: 1, L0374: 1, | | |
| | | | | | | | L0662: 1, L0768: 1, | | |
| | | | | | | | L0803: 1, L0775: 1, | | |
| | | | | | | | L0776: 1, L0368: 1, | | |
| | | | | | | | L0665: 1, H0689: 1, | | |
| | | | | | | | H0435: 1, H0659: 1, | | |
| | | | | | | | H0134: 1, L0749: 1, | | |
| | | | | | | | L0779: 1, L0759: 1 and | | |
| | | | | | | | S0194: 1. | | |
| 38 | HNHHF46 | 1126320 | 48 | 482-183 | 468 | Gln-48 to His-60, | AR061: 4, AR089: 4 | | |
| | | | | | | Gly-88 to Met-100. | L0748: 7, L0774: 2, | | |
| | | | | | | | S0216: 2, L0749: 2, | | |
| | | | | | | | H0455: 1, S0038: 1, | | |
| | | | | | | | S0464: 1, L0637: 1, | | |
| | | | | | | | L0804: 1, L0789: 1 and | | |
| | | | | | | | S0053: 1. | | |
| | | 859822 | 296 | 3-284 | 716 | | | | |
| 39 | HISAM68 | 1129136 | 49 | 2-535 | 469 | Val-1 to Leu-12, | AR089: 1, AR061: 0 | | |
| | | | | | | Ser-92 to Thr-97, | L0803: 6, L0774: 2, | | |
| | | | | | | Gly-136 to Gly-143. | H0056: 1, L0761: 1, | | |
| | | | | | | | L0800: 1, L0766: 1, | | |
| | | | | | | | L0806: 1 and H0539: 1. | | |
| | | 868785 | 297 | 1-498 | 717 | Ser-84 to Thr-89, | | | |
| | | | | | | Gly-128 to Gly-135, | | | |
| | | | | | | Pro-146 to Ser-160. | | | |
| 40 | HEQAY32 | 869178 | 50 | 604-924 | 470 | Pro-23 to Ala-30, | AR089: 2, AR061: 0 | | |
| | | | | | | Arg-63 to Pro-68, | L0438: 6, L0439: 5, | | |
| | | | | | | Gly-80 to Trp-85, | H0052: 3, L0743: 3, | | |
| | | | | | | Asn-92 to Gly-101. | L0731: 3, H0265: 2, | | |
| | | | | | | | H0617: 2, H0634: 2, | | |
| | | | | | | | L0769: 2, L0766: 2, | | |
| | | | | | | | L0381: 2, L0751: 2, | | |
| | | | | | | | L0749: 2, L0758: 2, | | |
| | | | | | | | S0282: 1, S0356: 1, | | |
| | | | | | | | H0675: 1, S0132: 1, | | |
| | | | | | | | H0645: 1, S0222: 1, | | |
| | | | | | | | H0438: 1, T0082: 1, | | |
| | | | | | | | H0194: 1, H0544: 1, | | |
| | | | | | | | H0178: 1, H0355: 1, | | |
| | | | | | | | H0428: 1, H0181: 1, | | |
| | | | | | | | H0361: 1, H0038: 1, | | |
| | | | | | | | H0040: 1, H0616: 1, | | |
| | | | | | | | H0063: 1, H0087: 1, | | |
| | | | | | | | T0067: 1, H0059: 1, | | |
| | | | | | | | H0649: 1, S0002: 1, | | |
| | | | | | | | H0529: 1, L0535: 1, | | |
| | | | | | | | L0761: 1, L0646: 1, | | |
| | | | | | | | L0771: 1, L0767: 1, | | |
| | | | | | | | L0806: 1, L0653: 1, | | |
| | | | | | | | L0776: 1, L0659: 1, | | |
| | | | | | | | L0789: 1, L0663: 1, | | |
| | | | | | | | H0144: 1, L0565: 1, | | |
| | | | | | | | H0690: 1, H0682: 1, | | |
| | | | | | | | H0696: 1, H0436: 1, | | |
| | | | | | | | S0028: 1, L0741: 1, | | |
| | | | | | | | L0759: 1, H0667: 1, | | |
| | | | | | | | S0276: 1, H0542: 1 and | | |
| | | | | | | | H0423: 1. | | |
| 41 | HSSJM44 | 871067 | 51 | 406-960 | 471 | Cys-1 to His-7. | AR089: 1, AR061: 1 | | |
| | | | | | | | L0439: 5, H0620: 3, | | |
| | | | | | | | L0769: 3, H0556: 2, | | |
| | | | | | | | H0012: 2, H0024: 2, | | |
| | | | | | | | S0051: 2, H0100: 2, | | |
| | | | | | | | L0770: 2, L0774: 2, | | |
| | | | | | | | L0438: 2, L0751: 2, | | |
| | | | | | | | L0779: 2, S0444: 1, | | |
| | | | | | | | H0500: 1, H0013: 1, | | |
| | | | | | | | H0575: 1, S0010: 1, | | |
| | | | | | | | H0421: 1, H0052: 1, | | |
| | | | | | | | T0110: 1, H0545: 1, | | |
| | | | | | | | H0009: 1, H0050: 1, | | |
| | | | | | | | H0083: 1, H0604: 1, | | |
| | | | | | | | S0036: 1, H0135: 1, | | |
| | | | | | | | H0038: 1, H0551: 1, | | |
| | | | | | | | H0264: 1, H0059: 1, | | |
| | | | | | | | L0564: 1, L0637: 1, | | |
| | | | | | | | L0772: 1, L0771: 1, | | |
| | | | | | | | L0499: 1, L0806: 1, | | |
| | | | | | | | H0547: 1, S0152: 1, | | |
| | | | | | | | H0555: 1, L0747: 1, | | |
| | | | | | | | L0777: 1, L0755: 1, | | |
| | | | | | | | L0758: 1, L0592: 1, | | |
| | | | | | | | L0758: 1 and H0352: 1. | | |
| 42 | HCWDL45 | 1137793 | 52 | 341-751 | 472 | Thr-1 to Trp-6, | AR089: 16, AR061:4 | | |
| | | | | | | Thr-33 to Pro-39, | H0305: 6 and S0052: 1. | | |
| | | | | | | Pro-54 to Pro-65, | | | |
| | | | | | | Gly-100 to Gln-108, | | | |
| | | | | | | Arg-117 to Asp-133. | | | |
| | | 889416 | 298 | 118-282 | 718 | Ala-33 to Ile-42. | | | |
| 43 | HTNBM01 | 910705 | 53 | 1-420 | 473 | Gly-1 to Gln-8, | AR050: 2, AR054: | | |
| | | | | | | Thr-36 to Glu-44. | 89, AR051: 72, AR061: | | |
| | | | | | | | 2, AR089: 1 | | |
| | | | | | | | H0591: 1, T0067: 1, | | |
| | | | | | | | S0038: 1 and L0485: 1. | | |
| 44 | HAHEF22 | 910996 | 54 | 3-839 | 474 | Lys-51 to Gly-58, | AR089: 16, AR061: 8 | | |
| | | | | | | Asp-67 to Glu-73. | L0803: 4, L0794: 3, | | |
| | | | | | | | L0747: 3, H0599: 2, | | |
| | | | | | | | L0659: 2, L0789: 2, | | |
| | | | | | | | S0364: 1, L0804: 1, | | |
| | | | | | | | H0539: 1, L0720: 1 and | | |
| | | | | | | | S0031: 1. | | |
| 45 | HOSFZ73 | 1128494 | 55 | 773-549 | 475 | Thr-48 to Asn-58, | AR089: 74, AR061: 10 | | |
| | | | | | | Asn-61 to Leu-67. | S0027: 5, S0356: 2, | | |
| | | | | | | | H0561: 2, L0662: 2, | | |
| | | | | | | | H0659: 2, L0591: 2, | | |
| | | | | | | | H0543: 2, S0282: 1, | | |
| | | | | | | | S0354: 1, H0619: 1, | | |
| | | | | | | | H0575: 1, S0010: 1, | | |
| | | | | | | | S0214: 1, H0674: 1, | | |
| | | | | | | | L0455: 1, H0494: 1, | | |
| | | | | | | | S0142: 1, L0667: 1, | | |
| | | | | | | | L0803: 1, L0805: 1, | | |
| | | | | | | | L0666: 1, L0663: 1, | | |
| | | | | | | | L0664: 1, H0539: 1, | | |
| | | | | | | | H0521: 1, H0436: 1, | | |
| | | | | | | | H0478: 1, H0631: 1, | | |
| | | | | | | | L0755: 1 and S0260: 1. | | |
| | | 913786 | 299 | 233-370 | 719 | | | | |
| 46 | HDPTQ41 | 1189814 | 56 | 3-437 | 476 | Asn-1 to Arg-15, | AR089: 5, AR061: 4 | | |
| | | | | | | Gly-32 to Gly-38, | L0803: 7, L0770: 2, | | |
| | | | | | | Glu-108 to Gln-117. | L0794: 2, L0804: 2, | | |
| | | | | | | | L0777: 2, L0731: 2, | | |
| | | | | | | | H0423: 2, T0049: 1, | | |
| | | | | | | | H0657: 1, S0360: 1, | | |
| | | | | | | | S0007: 1, S0046: 1, | | |
| | | | | | | | L0520: 1, L0761: 1, | | |
| | | | | | | | L0768: 1, L0775: 1, | | |
| | | | | | | | L0783: 1, L0787: 1, | | |
| | | | | | | | S0126: 1, H0659: 1, | | |
| | | | | | | | H0539: 1, H0521: 1, | | |
| | | | | | | | L0753: 1 and S0026: 1. | | |
| | | 913933 | 300 | 2-409 | 720 | Pro-1 to Arg-6, | | | |
| | | | | | | Gly-23 to Gly-29, | | | |
| | | | | | | Glu-99 to Gln-108. | | | |
| 47 | HDPXN01 | 1128577 | 57 | 237-55 | 477 | Val-10 to His-15. | AR089: 9, AR061: 4 | | |
| | | | | | | | L0794: 5, L0439: 2, | | |
| | | | | | | | L0747: 2, H0521: 1, | | |
| | | | | | | | L0779: 1, L0777: 1 and | | |
| | | | | | | | L0594: 1. | | |
| | | 915919 | 301 | 69-230 | 721 | Ser-48 to Ser-53. | | | |
| 48 | HCEOR02 | 921110 | 58 | 26-559 | 478 | Glu-1 to Glu-13. | AR061: 13, AR089: 6 | | |
| | | | | | | | H0052: 2, L0769: 2, | | |
| | | | | | | | H0556: 1, S0282: 1, | | |
| | | | | | | | T0082: 1 and L0790: 1. | | |
| 49 | HCFLI54 | 921382 | 59 | 259-522 | 479 | | AR089: 1, AR061: 0 | | |
| | | | | | | | L0439: 6, L0748: 5, | | |
| | | | | | | | L0758: 4, L0591: 4, | | |
| | | | | | | | L0766: 3, L0805: 3, | | |
| | | | | | | | L0438: 3, H0102: 2, | | |
| | | | | | | | L0666: 2, L0740: 2, | | |
| | | | | | | | H0423: 2, S0360: 1, | | |
| | | | | | | | S0046: 1, H0393: 1, | | |
| | | | | | | | H0411: 1, H0391: 1, | | |
| | | | | | | | H0586: 1, H0156: 1, | | |
| | | | | | | | H0575: 1, H0023: 1, | | |
| | | | | | | | H0266: 1, H0267: 1, | | |
| | | | | | | | H0622: 1, T0006: 1, | | |
| | | | | | | | H0674: 1, S0386: 1, | | |
| | | | | | | | L0770: 1, L0638; 1, | | |
| | | | | | | | L0373: 1, L0662: 1, | | |
| | | | | | | | L0776: 2, L0518: 1, | | |
| | | | | | | | L0809: 1, L0663: 1, | | |
| | | | | | | | H0684: 1, H0435: 1, | | |
| | | | | | | | H0648: 1, H0672: 1, | | |
| | | | | | | | H0436: 1, H0478: 1, | | |
| | | | | | | | L0744: 1 and L0747: 1. | | |
| 50 | HIBEV89 | 1112107 | 60 | 215-1102 | 480 | Gly-1 to Cys-19. | AR089: 0, AR061: 0 | | |
| | | | | | | | H0620: 3, S0007: 1, | | |
| | | | | | | | L0157: 1, H0012: 1, | | |
| | | | | | | | T0010: 1 and H0008: 1. | | |
| | | 922757 | 302 | 300-1103 | 722 | | | | |
| 51 | HWLUL28 | 925331 | 61 | 1-750 | 481 | Arg-11 to Pro-19, | AR089: 16, AR061: 9 | 16p13.3 | 141750, |
| | | | | | | Pro-36 to Asp-44, | L0439: 3, S0360: 2, | | 141800, |
| | | | | | | Lys-183 to Gly-189, | H0615: 2, L0770: 2, | | 141800, |
| | | | | | | Thr-201 to Arg-207. | L0666: 2, L0438: 2, | | 141800, |
| | | | | | | | L0749: 2, L0758: 2, | | 141800, |
| | | | | | | | L0596: 2, H0294: 1, | | 141850, |
| | | | | | | | H0351: 1, S0222: 1, | | 141850, |
| | | | | | | | H0441: 1, H0611: 1, | | 141850, |
| | | | | | | | H0599: 1, H0251: 1, | | 141850, |
| | | | | | | | H0046: 1, H0567: 1, | | 141850, |
| | | | | | | | H0081: 1, H0083: 1, | | 156850, |
| | | | | | | | H0213: 1, H0617: 1, | | 186580, |
| | | | | | | | L0055: 1, H0494: 1, | | 191092, |
| | | | | | | | H0560: 1, L0769: 1, | | 600140, |
| | | | | | | | L0761: 1, L0766: 1, | | 600273, |
| | | | | | | | L0649: 1, L0774: 1, | | 601313, |
| | | | | | | | L0775: 1, L0375: 1, | | 601785, |
| | | | | | | | L0805: 1, L0657: 1, | | |
| | | | | | | | L0526: 1, L0789: 1, | | |
| | | | | | | | L0665: 1, H0519: 1, | | |
| | | | | | | | H0658: 1, S0380: 1, | | |
| | | | | | | | L0748: 1, L0786: 1, | | |
| | | | | | | | L0777: 1, L0731: 1 and | | |
| | | | | | | | H0543: 1. | | |
| 52 | HLMDO95 | 928344 | 62 | 88-435 | 482 | | AR089: 27, AR061: 11 | | |
| | | | | | | | H0271: 3, H0250; 2, | | |
| | | | | | | | H0635: 2, S0216: 2, | | |
| | | | | | | | H0254: 1, H0638: 1, | | |
| | | | | | | | H0069: 1, H0416: 1, | | |
| | | | | | | | H0090: 1, L0761: 1, | | |
| | | | | | | | L0800: 1, L0776: 1, | | |
| | | | | | | | L0789: 1 and S0052: 1. | | |
| 53 | HCFCV92 | 1126274 | 63 | 197-3 | 483 | | AR089: 2, AR061: 2 | | |
| | | | | | | | L0766: 3, H0521: 2, | | |
| | | | | | | | H0422: 2, H0661: 1, | | |
| | | | | | | | H0369: 1, H0687: 1, | | |
| | | | | | | | L0646: 1, L0655: 1, | | |
| | | | | | | | L0665: 1, H0519: 1, | | |
| | | | | | | | H0436: 1 and L0779: 1. | | |
| | | 934216 | 303 | 413-655 | 723 | | | | |
| 54 | HLHDD45 | 1127882 | 64 | 455-240 | 484 | Phe-22 to Gln-28. | AR089: 33, AR061: 7 | | |
| | | | | | | | H0556: 3, H0208: 3, | | |
| | | | | | | | H0619: 3, H0050: 3, | | |
| | | | | | | | L0471: 3, H0179: 3, | | |
| | | | | | | | H0644: 3, S0344: 3, | | |
| | | | | | | | H0521: 3, L0439: 3, | | |
| | | | | | | | S0420: 2, S0360: 2, | | |
| | | | | | | | H0599: 2, H0264: 2, | | |
| | | | | | | | H0280: 2, S0210: 2, | | |
| | | | | | | | H0547: 2, H0658: 2, | | |
| | | | | | | | L0750: 2, L0731: 2, | | |
| | | | | | | | L0588: 2, L0604: 2, | | |
| | | | | | | | H0543: 2, H0265: 1, | | |
| | | | | | | | T0002: 1, H0140: 1, | | |
| | | | | | | | S0114: 1, H0341: 1, | | |
| | | | | | | | S0001: 1, H0669: 1, | | |
| | | | | | | | H0662: 1, H0306: 1, | | |
| | | | | | | | S0418: 1, H0580: 1, | | |
| | | | | | | | L0717: 1, H0549: 1, | | |
| | | | | | | | H0453: 1, H0592: 1, | | |
| | | | | | | | H0497: 1, H0632: 1, | | |
| | | | | | | | T0039: 1, T0112: 1, | | |
| | | | | | | | H0575: 1, H0036: 1, | | |
| | | | | | | | H0309: 1, H0544: 1, | | |
| | | | | | | | H0172: 1, H0123: 1, | | |
| | | | | | | | H0620: 1, H0024: 1, | | |
| | | | | | | | H0051: 1, H0188: 1, | | |
| | | | | | | | H0615: 1, H0604: 1, | | |
| | | | | | | | H0031: 1, L0456: 1, | | |
| | | | | | | | H0124: 1, H0376: 1, | | |
| | | | | | | | S0036: 1, H0059: 1, | | |
| | | | | | | | H0100: 1, T0041: 1, | | |
| | | | | | | | T0042: 1, S0150: 1, | | |
| | | | | | | | H0646: 1, H0538: 1, | | |
| | | | | | | | L0637: 1, L0551: 1, | | |
| | | | | | | | L0803: 1, L0659: 1, | | |
| | | | | | | | L0789: 1, L0663: 1, | | |
| | | | | | | | L0438: 1, H0520: 1, | | |
| | | | | | | | H0519: 1, S0126: 1, | | |
| | | | | | | | H0689: 1, H0651: 1, | | |
| | | | | | | | H0539: 1, S0152: 1, | | |
| | | | | | | | S0028: 1, L0748: 1, | | |
| | | | | | | | L0777: 1, L0753: 1, | | |
| | | | | | | | H0343: 1, L0591: 1, | | |
| | | | | | | | L0592: 1, L0593: 1, | | |
| | | | | | | | H0423: 1, H0422: 1, | | |
| | | | | | | | H0506: 1 and H0008: 1. | | |
| | | 942901 | 304 | 21-230 | 724 | Lys-1 to Gly-9 | | | |
| | | | | | | Ser-30 to Gly-36. | | | |
| 55 | HHSGV13 | 1038557 | 65 | 2-1090 | 485 | Phe-23 to Met-29, | AR089: 8, AR061: 4 | | |
| | | | | | | Glu-62 to Asp-69, | L0742: 6, L0438: 5, | | |
| | | | | | | Ser-84 to Tyr-89, | L0005: 4, H0052: 4, | | |
| | | | | | | Pro-156 to Ile-161, | S6024: 3, L0776: 3, | | |
| | | | | | | Tyr-181 to Gly-193, | L0439: 3, S0049: 2, | | |
| | | | | | | Pro-330 to Ser-342. | T0006: 2, H0144: 2, | | |
| | | | | | | | S0001: 1, S0222: 1, | | |
| | | | | | | | H0194: 1, H0009: 1, | | |
| | | | | | | | S0388: 1, T0010: 1, | | |
| | | | | | | | S6028: 1, L0351: 1, | | |
| | | | | | | | L0638: 1, L0768: 1, | | |
| | | | | | | | L0659: 1 and L0783: 1. | | |
| | | 943090 | 305 | 1-789 | 725 | Thr-9 to Ser-16, | | | |
| | | | | | | Pro-30 to Ser-35, | | | |
| | | | | | | Phe-58 to Met-64, | | | |
| | | | | | | Glu-97 to Asp-104, | | | |
| | | | | | | Ser-119 to Tyr-124, | | | |
| | | | | | | Pro-191 to Ile-196, | | | |
| | | | | | | Tyr-216 to Gly-228. | | | |
| 56 | HDPSJ02 | 943316 | 66 | 2-766 | 486 | Asp-10 to Ala-15, | AR089: 2, AR061: 2 | | |
| | | | | | | Leu-42 to Phe-52, | H0521: 11, L0751: 6, | | |
| | | | | | | His-110 to Leu-115, | H0445: 4, L0770: 3, | | |
| | | | | | | Gln-141 to Arg-150, | L0775: 3, L0769: 2, | | |
| | | | | | | Phe-168 to Arg-174. | L0764: 2, L0806: 2, | | |
| | | | | | | | L0744: 2, L0748: 2, | | |
| | | | | | | | L0747: 2, L0599: 2, | | |
| | | | | | | | H0638: 1, S0376: 1, | | |
| | | | | | | | S0360: 1, H0619: 1, | | |
| | | | | | | | H0351: 1, H0427: 1, | | |
| | | | | | | | H0575: 1, H0309: 1, | | |
| | | | | | | | T0023: 1, H0181: 1, | | |
| | | | | | | | H0617: 1, S0366: 1, | | |
| | | | | | | | S0142: 1, L0768: 1, | | |
| | | | | | | | S0374: 1, H0690: 1, | | |
| | | | | | | | H0672: 1, H0522: 1, | | |
| | | | | | | | H0555: 1, L0743: 1, | | |
| | | | | | | | L0749: 1, L0777: 1 and | | |
| | | | | | | | L0731: 1. | | |
| 57 | HBGQN46 | 945370 | 67 | 99-683 | 487 | Arg-25 to Ala-32, | AR089: 1, AR061: 0 | | |
| | | | | | | Ala-54 to Tyr-59. | H0617: 2, L0794: 2, | | |
| | | | | | | | L0766: 2, L0806: 2, | | |
| | | | | | | | L0777: 2, H0587: 1, | | |
| | | | | | | | L0767: 1, L0375: 1, | | |
| | | | | | | | L0790: 1, L0792: 1, | | |
| | | | | | | | L0743: 1, L0779: 1 and | | |
| | | | | | | | L0780: 1. | | |
| 58 | HE2SN25 | 1127461 | 68 | 1011-1184 | 488 | Leu-16 to Asp-27, | AR061: 4, AR089: 3 | | |
| | | | | | | Pro-36 to Gly-46, | L0439: 2, H0624: 1, | | |
| | | | | | | Lys-53 to Lys-58. | H0171: 1, S0114: 1, | | |
| | | | | | | | L0774: 1, H0539: 1 and | | |
| | | | | | | | L0752: 1. | | |
| | | 948687 | 306 | 134-277 | 726 | Thr-1 to His-10. | | | |
| 59 | HRODF07 | 952426 | 69 | 31-195 | 489 | | AR061: 5, AR089: 4 | | |
| | | | | | | | S0328: 7, S0330: 7, | | |
| | | | | | | | L0648: 6, L0549: 5, | | |
| | | | | | | | H0329: 1, H0039: 1, | | |
| | | | | | | | H0598: 1, S0352: 1, | | |
| | | | | | | | L0551: 1, S0432: 1 and | | |
| | | | | | | | L0755: 1. | | |
| 60 | HE8BQ58 | 1194060 | 70 | 84-317 | 490 | Gln-1 to Gly-8, | AR089: 32, AR061: 17 | | |
| | | | | | | Ser-28 to Asp-37, | L0747: 9, S0114: 3, | | |
| | | | | | | Gln-39 to Cys-47. | L0659: 3, L0749: 3, | | |
| | | | | | | | L0755: 3, H0595: 3, | | |
| | | | | | | | L0662: 2, L0776: 2, | | |
| | | | | | | | L0665: 2, H0659: 2, | | |
| | | | | | | | L0748: 2, L0740: 2, | | |
| | | | | | | | L0752: 2, H0556: 1, | | |
| | | | | | | | L0005: 1, S0358: 1, | | |
| | | | | | | | S0360: 1, L0717: 1, | | |
| | | | | | | | H0369: 1, H0013: 1, | | |
| | | | | | | | H0427: 1, H0318: 1, | | |
| | | | | | | | H0375: 1, H0266: 1, | | |
| | | | | | | | H0687: 1, H0252: 1, | | |
| | | | | | | | H0615: 1, H0622: 1, | | |
| | | | | | | | T0006: 1, H0644: 1, | | |
| | | | | | | | H0628: 1, T0067: 1, | | |
| | | | | | | | H0413: 1, S0142: 1, | | |
| | | | | | | | H0529: 1, L0763: 1, | | |
| | | | | | | | L0630: 1, L0764: 1, | | |
| | | | | | | | L0774: 1, L0653: 1, | | |
| | | | | | | | L0635: 1, L0809: 1, | | |
| | | | | | | | L0663: 1, S0378: 1, | | |
| | | | | | | | L0742: 1, L0779: 1, | | |
| | | | | | | | L0780: 1, L0757: 1, | | |
| | | | | | | | L0758: 1, L0759: 1, | | |
| | | | | | | | L0592: 1, S0026: 1, and | | |
| | | | | | | | S0276: 1. | | |
| | | 954449 | 307 | 78-311 | 727 | Gln-1 to Gly-8, | | | |
| | | | | | | Ser-28 to Pro-34. | | | |
| 61 | HNHCI32 | 861673 | 73 | 183-593 | 491 | Lys-17 to Thr-23, | AR051: 23, AR050: | | |
| | | | | | | His-95 to Thr-101. | 14, AR061: 10, AR054: | | |
| | | | | | | | 4, AR089: 3 | | |
| | | | | | | | S0053: 1 | | |
| | | 956105 | 308 | 963-553 | 728 | Lys-17 to Thr-23, | | | |
| | | | | | | His-95 to Thr-101. | | | |
| 62 | HSQCM85 | 1124689 | 72 | 345-605 | 492 | | AR050: 19, AR054: 9, | | |
| | | | | | | | AR051: 5, AR089: 1, | | |
| | | | | | | | AR061: 0 | | |
| | | | | | | | S0216: 1 and S0026: 1. | | |
| | | 963554 | 309 | 184-444 | 729 | | | | |
| 63 | HPTVL90 | 509487 | 73 | 2-211 | 493 | Pro-48 to Ile-54. | AR061: 1, AR089: 0 | | |
| | | | | | | | L0803: 6, L0748: 5, | | |
| | | | | | | | L0749: 4, H0424: 3, | | |
| | | | | | | | L0804: 3, L0774: 3, | | |
| | | | | | | | L0779: 3, H0213: 2, | | |
| | | | | | | | S0142: 2, L0789: 2, | | |
| | | | | | | | L0745: 2, L0731: 2, | | |
| | | | | | | | H0294: 1, H0254: 1, | | |
| | | | | | | | H0393: 1, H0549: 1, | | |
| | | | | | | | H0427: 1, H0156: 1, | | |
| | | | | | | | T0082: 1, H0052: 1, | | |
| | | | | | | | H0150: 1, H0024: 1, | | |
| | | | | | | | H0135: 1, H0268: 1, | | |
| | | | | | | | H0010: 1, S0344: 1, | | |
| | | | | | | | L0763: 1, L0769: 1, | | |
| | | | | | | | L0662: 1, L0775: 1, | | |
| | | | | | | | L0805: 1, L0657: 1, | | |
| | | | | | | | L0666: 1, H0144: 1, | | |
| | | | | | | | L0740: 1, L0750: 1 and | | |
| | | | | | | | L0755: 1. | | |
| 64 | HRDFA94 | 1156347 | 74 | 1-1962 | 494 | Gly-1 to Asn-10, | AR050: 376, AR051: | | |
| | | | | | | Val-18 to Lys-25, | 307, AR054: 293, | | |
| | | | | | | Leu-69 to Arg-78, | AR089: 105, AR061: | | |
| | | | | | | Asn-83 to Pro-89, | 33 | | |
| | | | | | | Thr-244 to Lys-258, | H0124: 1 and H0521: | | |
| | | | | | | Gly-293 to Gly-298, | 1. | | |
| | | | | | | Ser-352 to Asn-368, | | | |
| | | | | | | Asp-376 to Ala-389, | | | |
| | | | | | | Asp-465 to His-477, | | | |
| | | | | | | Pro-493 to Phe-499, | | | |
| | | | | | | Asp-523 to Ala-528. | | | |
| | | 577352 | 310 | 735-307 | 730 | Pro-5 to Lue-11. | | | |
| | | 937804 | 311 | 1-1572 | 731 | Gly-1 to Asn-10, | | | |
| | | | | | | Val-18 to Lys-25, | | | |
| | | | | | | Leu-69 to Arg-78, | | | |
| | | | | | | Asn-83 to Pro-89. | | | |
| 65 | HCE1S21 | 1010797 | 75 | 8-508 | 495 | Leu-7 to Ala-16, | AR061: 5, AR089: 2 | | |
| | | | | | | Pro-28 to Gly-34, | H0052: 1, L0581: 1 | | |
| | | | | | | Pro-124 to Thr-132, | and L0366: 1. | | |
| | | | | | | Ala-135 to Ser-142. | | | |
| | | 671209 | 312 | 1-297 | 732 | Glu-9 to Asp-14. | | | |
| 66 | HWHHW54 | 684125 | 76 | 853-1146 | 496 | Pro-50 to Gly-69, | AR089: 3, AR061: 1 | | |
| | | | | | | Pro-71 to Lys-80. | L0748: 6, L0747: 2, | | |
| | | | | | | | H0170: 1, H0586: 1, | | |
| | | | | | | | S0051: 1, H0163: 1, | | |
| | | | | | | | L0665: 1, H0670: 1, | | |
| | | | | | | | H0660: 1 and H0423: 1. | | |
| 67 | HDPGQ74 | 1223438 | 77 | 3-830 | 497 | Pro-59 to Leu-64, | AR061: 0, AR089: 0 | | |
| | | | | | | Trp-87 to Lys-93, | H0551: 5, H0545: 4, | | |
| | | | | | | His-164 to Ala-180, | H0521: 4, L0748: 4, | | |
| | | | | | | Pro-182 to His-188, | L0790: 3, S0278: 2, | | |
| | | | | | | Ser-229 to Asn-241, | H0586: 2, H0333: 2, | | |
| | | | | | | Arg-247 to Met-258, | H0632: 2, H0052: 2, | | |
| | | | | | | Ser-266 to Gly-274. | H0023: 2, S0250: 2, | | |
| | | | | | | | S0142: 2, S0426: 2, | | |
| | | | | | | | H0529: 2, L0565: 2, | | |
| | | | | | | | H0547: 2, L0439: 2, | | |
| | | | | | | | H0170: 1, H0685: 1, | | |
| | | | | | | | H0295: 1, H0458: 1, | | |
| | | | | | | | S0418: 1, L0534: 1, | | |
| | | | | | | | S0132: 1, H0587: 1, | | |
| | | | | | | | H0485: 1, H0544: 1, | | |
| | | | | | | | H0081: 1, L0471: 1, | | |
| | | | | | | | S0050: 1, S0388: 1, | | |
| | | | | | | | H0510: 1, H0286: 1, | | |
| | | | | | | | H0428: 1, H0032: 1, | | |
| | | | | | | | H0124: 1, H0488: 1, | | |
| | | | | | | | L0065: 1, H0538: 1, | | |
| | | | | | | | S0002: 1, L0770: 1, | | |
| | | | | | | | L0769: 1, L0646: 1, | | |
| | | | | | | | L0644: 1, L0773: 1, | | |
| | | | | | | | L0363: 1, L0774: 1, | | |
| | | | | | | | L0806: 1, L0654: 1, | | |
| | | | | | | | L0658: 1, L0663: 1, | | |
| | | | | | | | H0522: 1, L0743: 1, | | |
| | | | | | | | L0754: 1, L0747: 1, | | |
| | | | | | | | L0780: 1 and L0758: 1. | | |
| | | 691163 | 313 | 3-320 | 733 | Asp-19 to Leu-24. | | | |
| 68 | HTXGF27 | 695766 | 78 | 1-1011 | 498 | Gly-1 to Gly-6, | AR061: 3, AR089: 3 | | |
| | | | | | | Ser-16 to Ala-23, | L0769: 5, L0752: 5, | | |
| | | | | | | Thr-114 to Lys-120, | S0358: 4, H0448: 4, | | |
| | | | | | | Thr-274 to Ser-280, | L0754: 4, H0052: 3, | | |
| | | | | | | Arg-327 to Ser-337. | L0773: 3, L0666: 3, | | |
| | | | | | | | L0740: 3, L0750: 3, | | |
| | | | | | | | L0596: 3, H0370: 2, | | |
| | | | | | | | H0024: 2, H0083: 2, | | |
| | | | | | | | H0031: 2, H0090: 2, | | |
| | | | | | | | S0142: 2, L0766: 2, | | |
| | | | | | | | L0663: 2, L0747: 2, | | |
| | | | | | | | L0753: 2, L0588: 2, | | |
| | | | | | | | L0599: 2, H0265: 1, | | |
| | | | | | | | S0040: 1, H0583: 1, | | |
| | | | | | | | H0656: 1, S0442: 1, | | |
| | | | | | | | H0393: 1, H0431: 1, | | |
| | | | | | | | L0622: 1, H0635: 1, | | |
| | | | | | | | S0280: 1, L0521: 1, | | |
| | | | | | | | H0002: 1, H0036: 1, | | |
| | | | | | | | H0421: 1, H0204: 1, | | |
| | | | | | | | H0046: 1, H0014: 1, | | |
| | | | | | | | H0015: 1, S6028: 1, | | |
| | | | | | | | H0266: 1, H0169: 1, | | |
| | | | | | | | S0366: 1, H0040: 1, | | |
| | | | | | | | H0264: 1, S0038: 1, | | |
| | | | | | | | H0494: 1, L0772: 1, | | |
| | | | | | | | L0372: 1, L0374: 1, | | |
| | | | | | | | L0644: 1, L0765: 1, | | |
| | | | | | | | L0771: 1, L0364: 1, | | |
| | | | | | | | L0806: 1, L0659: 1, | | |
| | | | | | | | L0783: 1, L0647: 1, | | |
| | | | | | | | L0665: 1, H0435: 1, | | |
| | | | | | | | H0658: 1, H0214: 1, | | |
| | | | | | | | L0751: 1, L0731: 1, | | |
| | | | | | | | L0758: 1, L0759: 1, | | |
| | | | | | | | H0653: 1, L0642: 1 and | | |
| | | | | | | | H0352: 1. | | |
| 69 | HAPQW27 | 1217191 | 79 | 991-284 | 499 | Pro-16 to Arg-22, | AR061: 4, AR089: 1 | | |
| | | | | | | Gln-53 to Asp-61, | L0748: 5, L0744: 4, | | |
| | | | | | | Gly-104 to Ser-117, | L0751: 4, H0039: 3, | | |
| | | | | | | Phe-196 to Gly-201. | H0617: 3, L0646: 3, | | |
| | | | | | | | L0809: 3, L0779: 3, | | |
| | | | | | | | H0295: 2, H0255: 2, | | |
| | | | | | | | S0358: 2, H0575: 2, | | |
| | | | | | | | H0457: 2, H0181: 2, | | |
| | | | | | | | H0673: 2, L0637: 2, | | |
| | | | | | | | L0743: 2, L0750: 2, | | |
| | | | | | | | L0758: 2, S0116: 1, | | |
| | | | | | | | H0663: 1, S0356: 1, | | |
| | | | | | | | S0376: 1, S0360: 1, | | |
| | | | | | | | H0675: 1, S0007: 1, | | |
| | | | | | | | H0497: 1, H0590: 1, | | |
| | | | | | | | H0618: 1, H0253: 1, | | |
| | | | | | | | H0545: 1, S0051: 1, | | |
| | | | | | | | H0622: 1, H0030: 1, | | |
| | | | | | | | H0135: 1, H0538: 1, | | |
| | | | | | | | S0426: 1, H0529: 1, | | |
| | | | | | | | L0763: 1, L0769: 1, | | |
| | | | | | | | L0764: 1, L0771: 1, | | |
| | | | | | | | L0773: 1, L0775: 1, | | |
| | | | | | | | L0788: 1, L0663: 1, | | |
| | | | | | | | H0144: 1, L0438: 1, | | |
| | | | | | | | H0690: 1, H0670: 1, | | |
| | | | | | | | H0672: 1, S0328: 1, | | |
| | | | | | | | S0406: 1, H0187: 1, | | |
| | | | | | | | L0747: 1, L0749: 1, | | |
| | | | | | | | L0759: 1 and L0608: 1. | | |
| | | 705518 | 314 | 1-327 | 734 | Asn-3 to Arg-11, | | | |
| | | | | | | Gly-42 to Asp-50. | | | |
| 70 | HCUGR38 | 706471 | 80 | 3-317 | 500 | Ser-2 to His-7, | AR089: 1, AR061: 0 | | |
| | | | | | | Pro-14 to Leu-20, | H0402: 1 and H0305: 1. | | |
| | | | | | | Ala-33 to Gly-38. | | | |
| 71 | HCUGN19 | 716989 | 81 | 35-382 | 501 | Glu-58 to Gly-64, | AR089: 7, AR061: 2 | | |
| | | | | | | Pro-77 to Cys-93, | L0744: 3, L0766: 2, | | |
| | | | | | | Pro-96 to Pro-106. | H0402: 1 and L0754: 1. | | |
| 72 | HDPTW90 | 1171161 | 82 | 1-282 | 502 | Gly-13 to Gly-18, | AR089: 0, AR061: 0 | | |
| | | | | | | Arg-26 to Gly-33, | H521: 2 and H0641: 1. | | |
| | | | | | | Gly-40 to Gly-49. | | | |
| | | 722699 | 315 | 1-282 | 735 | Gly-13 to Gly-18, | | | |
| | | | | | | Arg-26 to Gly-33, | | | |
| | | | | | | Gly-40 to Gly-49. | | | |
| 73 | HPTGB43 | 726460 | 83 | 3-266 | 503 | His-1 to Ser-8, | AR089: 9, AR061: 7 | | |
| | | | | | | Thr-68 to Lys-76. | | | |
| 74 | HEONO59 | 741361 | 84 | 325-756 | 504 | | AR089: 5, AR061: 3 | | |
| | | | | | | | H0457: 1 and L0752: 1. | | |
| 75 | HWBBR65 | 1165264 | 85 | 2075-1704 | 505 | Lys-1 to Gln-8, | AR089: 28, AR061: 24 | | |
| | | | | | | Gln-28 to Gly-34, | L0748: 2, H0580: 1 | | |
| | | | | | | Pro-46 to Arg-51, | and H0421: 1. | | |
| | | | | | | Ser-66 to Glu-74, | | | |
| | | | | | | Leu-91 to Trp-97, | | | |
| | | | | | | Cys-107 tO Arg-112. | | | |
| | | 747723 | 316 | 32-232 | 736 | Gly-1 to Ser-9. | | | |
| 76 | HFTCF28 | 778653 | 86 | 216-542 | 506 | | AR061: 9, AR089: 9 | | |
| | | | | | | | H0123: 1 and L0747: 1. | | |
| 77 | HEGAO83 | 780837 | 87 | 3-326 | 507 | Lys-1 to Ser-52. | AR089: 9, AR061: 7 | | |
| | | | | | | | H0550: 1 and H0253: 1. | | |
| 78 | HPIAU71 | 1125171 | 88 | 302-742 | 508 | Gln-32 to Asp-39. | AR089: 1, AR061: 1 | | |
| | | | | | | | S0150: 2, S3014: 1 and | | |
| | | | | | | | S0028: 1. | | |
| | | 786811 | 317 | 55-333 | 737 | Phe-36 to Ser-54, | | | |
| | | | | | | Ala-64 to Asn-70. | | | |
| 79 | HYABB43 | 1126556 | 89 | 765-1091 | 509 | Tyr-51 to Cys-66. | AR050: 136, AR054: | | |
| | | | | | | | 109, AR051: 95, | | |
| | | | | | | | AR089: 1, AR061: 1 | | |
| | | | | | | | L0805: 2, H0583: 1, | | |
| | | | | | | | L0764: 1, L0375: 1, | | |
| | | | | | | | L0776: 1, L0740: 1, | | |
| | | | | | | | L0731: 1 and L0759: 1. | | |
| | | 800006 | 318 | 368-21 | 738 | Lys-16 to Arg-21, | | | |
| | | | | | | Ser-44 to Arg-52. | | | |
| 80 | HHPDX35 | 1182277 | 90 | 1-2232 | 510 | Gln-57 to Gln-62, | AR050: 634, AR051: | | |
| | | | | | | Gln-262 to Thr-267, | 564, AR054: 414, | | |
| | | | | | | Asn-354 to Ser-360, | AR089: 1, AR061: 0 | | |
| | | | | | | Pro-413 to Thr-421, | L0748: 4, L0105: 2, | | |
| | | | | | | Ser-424 to Gly-429, | H0031: 2, H0494: 2, | | |
| | | | | | | Arg-459 to Ser-466, | L0637: 2, L0662: 2, | | |
| | | | | | | Asn-469 to Asn-474, | L0803: 2, L0666: 2, | | |
| | | | | | | Ala-490 to Tyr-496, | H0624: 1, H0171: 1, | | |
| | | | | | | Gln-519 to Gly-524, | L0005: 1, L0717: 1, | | |
| | | | | | | Ser-563 to Cys-573, | H0411: 1, H0587: 1, | | |
| | | | | | | Pro-587 to Cys-598, | H0485: 1, H0105: 1, | | |
| | | | | | | His-600 to Phe-610, | H0051: 1, H0622: 1, | | |
| | | | | | | Ser-626 to Met-635, | L0363: 1, L0364: 1, | | |
| | | | | | | Ala-669 to His-674, | L0389: 1, L0659: 1, | | |
| | | | | | | Ser-679 to Arg-690, | S0374: 1, H0670: 1, | | |
| | | | | | | Ala-696 to Glu-719, | S0028: 1, L0743: 1, | | |
| | | | | | | Gln-727 to Gln-738. | L0754: 1 and L0758: 1. | | |
| | | 810391 | 319 | 3-350 | 739 | | | | |
| | | 948421 | 320 | 3-680 | 740 | Gln-56 to Gln-61, | | | |
| | | | | | | Ser-149 to Met-154. | | | |
| | | 956581 | 321 | 199-309 | 741 | | | | |
| 81 | HHAMF38 | 1193198 | 91 | 37-1305 | 511 | Asp-19 to Trp-40, | AR089: 3, AR061: 2 | | |
| | | | | | | Thr-47 to Gln-52, | L0803: 3, L0805: 2, | | |
| | | | | | | His-55 to Val-64, | L0809: 2, S0044: 2, | | |
| | | | | | | Glu-73 to Gly-80, | L0731: 2, L0605: 2, | | |
| | | | | | | Asn-89 to Asp-96, | H0656: 1, H0455: 1, | | |
| | | | | | | Asp-104 to Ser-119. | N0007: 1, S0051: 1, | | |
| | | | | | | | S0422: 1, L0769: 1, | | |
| | | | | | | | L0637: 1, L0641: 1, | | |
| | | | | | | | L0794: 1, L0766: 1, | | |
| | | | | | | | L0804: 1, L0775: 1, | | |
| | | | | | | | L0806: 1, H0519: 1, | | |
| | | | | | | | H0521: 1, L0439: 1, | | |
| | | | | | | | L0749: 1, L0779: 1, | | |
| | | | | | | | L0759: 1 and H0543: 1. | | |
| | | 810846 | 322 | 1-519 | 742 | Asp-8 to Arg-23. | | | |
| 82 | HFIJC31 | 828148 | 92 | 72-518 | 512 | Glu-8 to Ile-20, | AR089: 2, AR061: 1 | | |
| | | | | | | Pro-22 to Pro-28, | L0804: 1, L0809: 1, | | |
| | | | | | | Glu-46 to Trp-58. | L0788: 1, H0593: 1, | | |
| | | | | | | | L0756: 1 and S0194: 1. | | |
| 83 | HNTRL43 | 1143390 | 93 | 709-1578 | 513 | Ser-53 to Leu-68, | AR089: 1, AR061: 1 | | |
| | | | | | | Val-73 to Ser-78, | L0659: 3, L0439: 3, | | |
| | | | | | | Gln-98 to Pro-104, | L0592: 3, S0007: 2, | | |
| | | | | | | His-113 to Arg-122, | L0775: 2, L0809: 2, | | |
| | | | | | | Arg-138 to Gly-144, | L0759: 2, H0619: 1, | | |
| | | | | | | Gly-154 to Gly-160, | H0455: 1, H0012: 1, | | |
| | | | | | | Gln-174 to Glu-179, | H0620: 1, T0010: 1, | | |
| | | | | | | Gln-182 to Pro-189, | L0769: 1, L0662: 1, | | |
| | | | | | | Pro-227 to Thr-232, | L0794: 1, L0804: 1, | | |
| | | | | | | Gly-264 to Pro-273, | L0378: 1, L0805: 1, | | |
| | | | | | | Pro-283 to Thr-290. | L0791: 1, L0663: 1, | | |
| | | | | | | | L0665: 1, H0144: 1, | | |
| | | | | | | | L0438: 1, H0547: 1, | | |
| | | | | | | | H0670: 1, L0741: 1 and | | |
| | | | | | | | L0779: 1. | | |
| | | 835705 | 323 | 86-427 | 743 | His-1 to Asp-11. | | | |
| 84 | HOFNC80 | 1193220 | 97 | 1871-1065 | 514 | Thr-8 to Gly-25, | AR051: 12, AR050: | | |
| | | | | | | Thr-58 to Val-63, | 12, AR054: 10, AR061: | | |
| | | | | | | Pro-102 to Gly-107, | 2, AR089: 1 | | |
| | | | | | | Val-135 to Arg-147, | H0415: 1 | | |
| | | | | | | Leu-174 to Lys-185, | | | |
| | | | | | | Thr-188 to Gly-194, | | | |
| | | | | | | Ala-209 to Gly-219, | | | |
| | | | | | | Asp-223 to Trp-228, | | | |
| | | | | | | Ala-232 to Gly-254, | | | |
| | | | | | | Lys-260 to Ser-269. | | | |
| | | 835718 | 324 | 1-315 | 744 | Ser-9 to Lys-18. | | | |
| 85 | HBJJX53 | 1217030 | 95 | 513-1 | 515 | Gly-18 to Leu-23, | AR061: 6, AR089: 4 | | |
| | | | | | | Pro-30 to Arg-49, | H0318: 1 | | |
| | | | | | | Arg-57 to Leu-72, | | | |
| | | | | | | Gln-115 to Cys-120, | | | |
| | | | | | | Pro-162 to Ser-171. | | | |
| | | 835733 | 325 | 79-393 | 745 | | | | |
| 86 | HNTBF75 | 1090339 | 96 | 44-517 | 516 | Arg-85 to Asp-91. | AR089: 13, AR061: 5 | | |
| | | | | | | | S0003: 5, S0354: 2, | | |
| | | | | | | | S0214: 2, H0519: 2, | | |
| | | | | | | | H0689: 2, H0522: 2, | | |
| | | | | | | | L0748: 2, L0439: 2, | | |
| | | | | | | | L0731: 2, L0759: 2, | | |
| | | | | | | | H0171: 1, T0002: 1, | | |
| | | | | | | | S0040: 1, H0669: 1, | | |
| | | | | | | | S0356: 1, S0358: 1, | | |
| | | | | | | | S0360: 1, H0431: 1, | | |
| | | | | | | | H0586: 1, H0574: 1, | | |
| | | | | | | | H0632: 1, H0156: 1, | | |
| | | | | | | | H0575: 1, H0590: 1, | | |
| | | | | | | | T0110: 1, L0471: 1, | | |
| | | | | | | | S6028: 1, H0628: 1, | | |
| | | | | | | | S0036: 1, H0494: 1, | | |
| | | | | | | | S0450: 1, S0144: 1, | | |
| | | | | | | | L0803: 1, L0809: 1, | | |
| | | | | | | | L0438: 1, H0520: 1, | | |
| | | | | | | | H0547: 1, H0660: 1, | | |
| | | | | | | | S0328: 1, H0521: 1, | | |
| | | | | | | | S0434: 1, L0605: 1, | | |
| | | | | | | | L0599: 1, L0593: 1, | | |
| | | | | | | | H0668: 1 and H0543: 1. | | |
| | | 836701 | 326 | 43-330 | 746 | | | | |
| 87 | HSKIA89 | 837986 | 97 | 296-634 | 517 | | AR089: 8, AR061: 2 | | |
| | | | | | | | H0435: 1, H0539: 1 and | | |
| | | | | | | | S3014: 1. | | |
| 88 | HHAME78 | 840939 | 98 | 3-263 | 518 | | AR089: 1, AR061: 1 | | |
| | | | | | | | H0624: 1, S0420: 1, | | |
| | | | | | | | S0366: 1, H0135: 1, | | |
| | | | | | | | H0494: 1, S0422: 1, | | |
| | | | | | | | L0745: 1 and L0758: 1. | | |
| 89 | HHFCI36 | 844285 | 99 | 1-351 | 519 | | AR061: 4, AR089: 3 | | |
| | | | | | | | L0748: 10, H0050: 2, | | |
| | | | | | | | H0616: 2, L0657: 2, | | |
| | | | | | | | L0581: 2, H0294: 1, | | |
| | | | | | | | S0132: 1, S0222: 1, | | |
| | | | | | | | H0431: 1, H0597: 1, | | |
| | | | | | | | H0172: 1, H0123: 1, | | |
| | | | | | | | H0014: 1, L0177: 1, | | |
| | | | | | | | S0003: 1, H0428: 1, | | |
| | | | | | | | H0124: 1, H0040: 1, | | |
| | | | | | | | L0065: 1, S0422: 1, | | |
| | | | | | | | L0378: 1, L0438: 1, | | |
| | | | | | | | H0519: 1, H0690: 1, | | |
| | | | | | | | S3012: 1, L0747: 1, | | |
| | | | | | | | L0777: 1, S0106: 1, | | |
| | | | | | | | S0011: 1 and S0026: 1. | | |
| 90 | HDPXL24 | 1182266 | 100 | 3-2024 | 520 | Pro-2 to Pro-7, | AR050: 25, AR054: | | |
| | | | | | | Tyr-87 to Asp-98, | 23, AR051: 18, AR089: | | |
| | | | | | | Asp-111 to Cys-117, | 2, AR061: 1 | | |
| | | | | | | Pro-121 to Ser-129, | H0521: 12, L0751: 6, | | |
| | | | | | | Asp-164 to Ala-169, | H0445: 4, L0770: 3, | | |
| | | | | | | Leu-196 to Phe-206, | L0775: 3, L0769: 2, | | |
| | | | | | | His-264 to Leu-269, | L0764: 2, L0806: 2, | | |
| | | | | | | Gln-295 to Arg-304, | L0744: 2, L0748: 2, | | |
| | | | | | | Phe-322 to Arg-328, | L0747: 2, L0599: 2, | | |
| | | | | | | Ser-544 to Ala-549, | H0638: 1, S0376: 1, | | |
| | | | | | | Arg-572 to Gly-577, | S0360: 1, H0619: 1, | | |
| | | | | | | Val-643 to Val-648. | H0351: 1, H0427: 1, | | |
| | | | | | | | H0575: 1, H0309: 1, | | |
| | | | | | | | T0023: 1, H0181: 1, | | |
| | | | | | | | H0617: 1, S0366: 1, | | |
| | | | | | | | S0142: 1, L0768: 1, | | |
| | | | | | | | S0374: 1, H0690: 1, | | |
| | | | | | | | H0672: 1, H0522: 1, | | |
| | | | | | | | H0555: 1, L0743: 1, | | |
| | | | | | | | L0749: 1, L0777: 1 and | | |
| | | | | | | | L0371: 1. | | |
| | | 846775 | 327 | 3-434 | 747 | | | | |
| 91 | HACCH94 | 847143 | 101 | 1-897 | 521 | Gly-1 to Ser-6, | AR061: 4, AR089: 2 | | |
| | | | | | | Arg-76 to Gln-88, | L0754: 6, L0766: 3, | | |
| | | | | | | Lys-113 to Ser-119, | L0731: 2, H0624: 1, | | |
| | | | | | | Tyr-125 to Lys-132, | H0170: 1, S0116: 1, | | |
| | | | | | | Ser-167 to Tyr-179, | S0280: 1, H0545: 1, | | |
| | | | | | | Arg-263 to Tyr-281, | T0006: 1, S0344: 1, | | |
| | | | | | | Ser-294 to Thr-299. | S0426: 1, L0770: 1, | | |
| | | | | | | | L0790: 1, L0748: 1, | | |
| | | | | | | | L0756: 1, L0779: 1, | | |
| | | | | | | | L0589: 1 and L0462: 1. | | |
| 92 | HTEOF80 | 1181204 | 102 | 296-1048 | 522 | Phe-1 to Ala-15, | AR061: 7, AR089: 3 | | |
| | | | | | | Gly-26 to Gly-32, | H0616: 3 | | |
| | | | | | | Leu-35 to Pro-40, | | | |
| | | | | | | Gln-54 to Ser-71, | | | |
| | | | | | | Glu-87 to Asn-101, | | | |
| | | | | | | Tyr-135 to Gln-145, | | | |
| | | | | | | Tyr-177 to Val-182, | | | |
| | | | | | | Glu-212 to Phe-233, | | | |
| | | | | | | Cys-235 to Gly-245. | | | |
| | | 847224 | 328 | 2-262 | 748 | Val-17 to Arg-23, | | | |
| | | | | | | Tyr-28 to Ser-34, | | | |
| | | | | | | Thr-41 to Cys-47. | | | |
| 93 | HTEED80 | 849075 | 103 | 182-850 | 523 | | AR089: 13, AR061: 12 | | |
| | | | | | | | L0766: 5, L0759: 5, | | |
| | | | | | | | L0794: 3, L0775: 3, | | |
| | | | | | | | L0779: 3, H0038: 2, | | |
| | | | | | | | L0763: 2, L0774: 2, | | |
| | | | | | | | L0518: 2, L0528: 2, | | |
| | | | | | | | L0790: 2, L0665: 2, | | |
| | | | | | | | H0144: 2, H0670: 2, | | |
| | | | | | | | L0599: 2, H0663: 1, | | |
| | | | | | | | S0444: 1, H0486: 1, | | |
| | | | | | | | T0060: 1, H0013: 1, | | |
| | | | | | | | S0280: 1, S0050: 1, | | |
| | | | | | | | S6028: 1, H0615: 1, | | |
| | | | | | | | H0030: 1, H0553: 1, | | |
| | | | | | | | H0634: 1, H0647: 1, | | |
| | | | | | | | H0654: 1, H0529: 1, | | |
| | | | | | | | L0638: 1, L0761: 1, | | |
| | | | | | | | L0771: 1, L0773: 1, | | |
| | | | | | | | L0767: 1, L0387: 1, | | |
| | | | | | | | L0803: 1, L0804: 1, | | |
| | | | | | | | L0607: 1, L0657: 1, | | |
| | | | | | | | L0517: 1, L0809: 1, | | |
| | | | | | | | H0648: 1, H0672: 1, | | |
| | | | | | | | L0748: 1, L0740: 1, | | |
| | | | | | | | L0749: 1, L0756: 1, | | |
| | | | | | | | L0758: 1, L0591: 1, | | |
| | | | | | | | L0592: 1 and H0543: 1. | | |
| 94 | HDPND85 | 852628 | 104 | 68-853 | 524 | Ser-1 to Pro-10. | AR089: 0, AR061: 0 | | |
| | | | | | | | L0747: 6, H0638: 3, | | |
| | | | | | | | L0758: 3, L0157: 2, | | |
| | | | | | | | H0529: 2, L0764: 2, | | |
| | | | | | | | L0774: 2, L0776: 2, | | |
| | | | | | | | H0521: 2, H0522: 2, | | |
| | | | | | | | L0779: 2, L0603: 2, | | |
| | | | | | | | H0662: 1, S0358: 1, | | |
| | | | | | | | S0222: 1, H0038: 1, | | |
| | | | | | | | H0625: 1, S0448: 1, | | |
| | | | | | | | L0371: 1, L0770: 1, | | |
| | | | | | | | L0769: 1, L0775: 1, | | |
| | | | | | | | L0809: 1, L0791: 1, | | |
| | | | | | | | L0666: 1, H0144: 1, | | |
| | | | | | | | H0520: 1, H0436: 1, | | |
| | | | | | | | L0748: 1, L0755: 1 and | | |
| | | | | | | | L0731: 1. | | |
| 95 | HKABI68 | 8569590 | 105 | 1-471 | 525 | Arg-20 to Arg-30, | AR089: 23, AR061: 12 | | |
| | | | | | | Arg-74 to Lys-82. | S0046: 1, H0100: 1, | | |
| | | | | | | | H0494: 1, H0521: 1, | | |
| | | | | | | | H0522: 1 and S0028: 1. | | |
| 96 | HWHPO29 | 857383 | 106 | 236-670 | 526 | | AR061: 2, AR089: 1 | | |
| | | | | | | | H0586: 2, L0803: 2, | | |
| | | | | | | | L0439: 2, H0529: 1, | | |
| | | | | | | | H0587: 1, L0021: 1, | | |
| | | | | | | | L0456: 1, H0494: 1, | | |
| | | | | | | | S0448: 1, L0662: 1 and | | |
| | | | | | | | L0774: 1. | | |
| 97 | H7TBC95 | 865922 | 107 | 3-704 | 527 | Gln-154 to Ser-163. | AR089: 1, AR061: 1 | | |
| | | | | | | | S0198: 57, S0274: 12, | | |
| | | | | | | | S0252: 4, S0270: 3, | | |
| | | | | | | | S0264: 1, S0268: 1 and | | |
| | | | | | | | S0228: 1. | | |
| | | 908115 | 329 | 3-704 | 749 | Gln-154 to Ser-163. | | | |
| 98 | HBGDA14 | 866258 | 108 | 3-503 | 528 | Gln-9 to Gln-16, | AR061: 794, AR089: | | |
| | | | | | | Thr-33 to Gly-42, | 295 | | |
| | | | | | | Gly-94 to Gln-101, | S0050: 2, S0031: 2, | | |
| | | | | | | Asp-108 to Arg-114. | A0260: 2, H0181: 1, | | |
| | | | | | | | H0617: 1 and S0390: 1. | | |
| 99 | HSLHT48 | 1207945 | 109 | 1098-499 | 529 | Asp-1 to Lys-13, | AR061: 1, AR089: 1 | | |
| | | | | | | Gln-67 to Trp-76, | S0028: 2, S0045: 1, | | |
| | | | | | | Thr-82 to Thr-89, | S6026: 1, H0231: 1, | | |
| | | | | | | Ile-139 to Asp-146, | S0050: 1, H0617: 1, | | |
| | | | | | | Lys-164 to Thr-169, | H0189: 1 and S0144: 1. | | |
| | | | | | | Pro-178 to Ser-183. | | | |
| | | 871996 | 330 | 81-542 | 750 | Pro-17 to Ala-22. | | | |
| 100 | HE2KL28 | 1127459 | 110 | 2-589 | 530 | Lys-170 to Glu-175. | AR089: 1, AR061: 0 | | |
| | | | | | | | H0624: 2, H0171: 2, | | |
| | | | | | | | L0002: 1, H0599: 1, | | |
| | | | | | | | L0163: 1, S0388: 1, | | |
| | | | | | | | S0366: 1, L0520: 1, | | |
| | | | | | | | L0777: 1 and L0758: 1. | | |
| | | 872201 | 331 | 1-372 | 751 | Pro-8 to Leu-20, | | | |
| | | | | | | Ile-42 to Asp-47. | | | |
| 101 | HCFND04 | 1156311 | 111 | 3-1124 | 531 | Thr-1 to Leu-15, | AR089: 7, AR061: 3 | | |
| | | | | | | Gln-46 to Gly-54, | S0474: 1, T0067: 1, | | |
| | | | | | | Glu-60 to Asn-72, | L0805: 1, L0777: 1, | | |
| | | | | | | Glu-74 to Pro-86, | L0780: 1 and H0423: 1. | | |
| | | | | | | Gln-92 to Thr-100, | | | |
| | | | | | | Pro-106 to Lys-115, | | | |
| | | | | | | Pro-120 to Lys-129, | | | |
| | | | | | | Leu-135 to Lys-143, | | | |
| | | | | | | Pro-149 to Gly-162, | | | |
| | | | | | | Lys-165 to Lys-177, | | | |
| | | | | | | Asp-185 to Glu-203, | | | |
| | | | | | | Gly-228 to Met-233, | | | |
| | | | | | | Asp-290 to Trp-296, | | | |
| | | | | | | Tyr-298 to Ile-306, | | | |
| | | | | | | Thr-314 to Tyr-323, | | | |
| | | | | | | Thr-363 to Thr-368. | | | |
| | | 873441 | 332 | 273-1145 | 752 | Ile-10 to Cys-21, | | | |
| | | | | | | Thr-24 to Gln-60. | | | |
| 102 | HLDBM06 | 1200004 | 112 | 75-1160 | 532 | Ser-16 to Trp-21, | AR089: 3, AR061: 1 | | |
| | | | | | | Lys-49 to Pro-54, | H0393: 2, L0766: 2, | | |
| | | | | | | Ser-76 to Ser-81, | S0278: 1, H0486: 1, | | |
| | | | | | | Phe-89 to His-94, | H0124: 1, H0509: 1 and | | |
| | | | | | | Gly-96 to Gly-102, | S0126: 1. | | |
| | | | | | | Ala-114 to Cys-122, | | | |
| | | | | | | Cys-129 to Phe-136, | | | |
| | | | | | | Ser-191 to Ala-198, | | | |
| | | | | | | Thr-203 to Glu-212, | | | |
| | | | | | | Ala-217 to Asn-223, | | | |
| | | | | | | Ser-235 to Ser-240, | | | |
| | | | | | | Pro-269 to Lys-275, | | | |
| | | | | | | Arg-278 to Asp-287, | | | |
| | | | | | | Lys-301 to Ser-307, | | | |
| | | | | | | Ala-320 to Glu-329, | | | |
| | | | | | | Ala-341 to Glu-346, | | | |
| | | | | | | Asp-349 to Gly-354, | | | |
| | | 878341 | 333 | 65-550 | 753 | Ser-16 to Trp-21, | | | |
| | | | | | | Lys-49 to Pro-54, | | | |
| | | | | | | Ser-76 to Ser-81, | | | |
| | | | | | | Phe-89 to His-94, | | | |
| | | | | | | Gly-96 to Gly-102, | | | |
| | | | | | | Ala-114 to Cys-122, | | | |
| | | | | | | Cys-129 to Phe-136, | | | |
| | | | | | | Tyr-152 to Ile-162. | | | |
| 103 | HDPMT22 | 1216488 | 113 | 1155-1 | 533 | Asp-40 to Leu-52, | AR089: 13, AR061: 9 | | |
| | | | | | | Val-120 to Gly-127, | S0354: 1, S0278: 1, | | |
| | | | | | | His-129 to Val-135, | H0050: 1, H0521: 1 and | | |
| | | | | | | Gly-140 to Arg-148, | H0522: 1. | | |
| | | | | | | Pro-158 to Trp-168, | | | |
| | | | | | | Ser-204 to Lys-232, | | | |
| | | | | | | Asp-321 to Gly-326, | | | |
| | | | | | | Pro-361 to Gly-369. | | | |
| | | 881656 | 334 | 3-347 | 754 | Glu-66 to Ser-73. | | | |
| 104 | HDPRN38 | 883658 | 114 | 78-749 | 534 | Leu-60 to Gln-65, | AR089: 11, AR061: 3 | | |
| | | | | | | Arg-79 to Val-81. | H0510: 2, L0666: 2, | | |
| | | | | | | | L0740: 2, L0595: 2, | | |
| | | | | | | | H0657: 1, H0580: 1, | | |
| | | | | | | | H0619: 1, H0357: 1, | | |
| | | | | | | | H0632: 1, H0013: 1, | | |
| | | | | | | | H0024: 1, H0578: 1, | | |
| | | | | | | | H0591: 1, H0509: 1, | | |
| | | | | | | | L0769: 1, L0804: 1, | | |
| | | | | | | | L0774: 1, L0805: 1, | | |
| | | | | | | | L0776: 1, L0527: 1, | | |
| | | | | | | | H0521: 1, H0555: 1, | | |
| | | | | | | | L0749: 1, L0757: 1 and | | |
| | | | | | | | H0423: 1. | | |
| 105 | HETKH30 | 884009 | 115 | 90-884 | 535 | Arg-1 to Lys-8. | AR061: 1, AR089: 1 | | |
| | | | | | | | H0046: 5, H0040: 2, | | |
| | | | | | | | H0519: 2, L0439: 2, | | |
| | | | | | | | L0758: 2, H0575: 1 and | | |
| | | | | | | | T0042: 1. | | |
| 106 | HPIBQ37 | 884289 | 116 | 2-424 | 536 | Ile-47 to Val-53, | AR089: 4, AR061: 2 | | |
| | | | | | | Phe-71 to Thr-76, | S0150: 2 | | |
| | | | | | | Ser-105 to Thr-113, | | | |
| | | | | | | Glu-121 to Ser-129. | | | |
| 107 | HE8DY76 | 1136114 | 117 | 3-1775 | 537 | Asp-55 to Arg-63, | AR054: 19, AR050: 3, | | |
| | | | | | | Thr-92 to Glu-97, | AR051: 2, AR061: 1, | | |
| | | | | | | Arg-110 to Gly-124, | AR089: 0 | | |
| | | | | | | Thr-134 to Pro-139, | L0777: 5, L0759: 3, | | |
| | | | | | | Asn-185 to Met-193, | L0766: 2, H0411: 1, | | |
| | | | | | | Ser-223 to Ser-236, | H0031: 1, H0051: 1, | | |
| | | | | | | Pro-305 to Asn-312, | L0598: 1, L0666: 1, | | |
| | | | | | | Val-329 to Pro-334, | S0216: 1, L0747: 1, | | |
| | | | | | | Asn-343 to Ser-353, | L0779: 1 and S0384: 1. | | |
| | | | | | | Thr-369 to Lys-376, | | | |
| | | | | | | Ala-466 to Asn-471, | | | |
| | | | | | | Pro-496 to Arg-504, | | | |
| | | | | | | Ala-541 to Glu-550, | | | |
| | | | | | | Asn-562 to Gly-569. | | | |
| | | 877906 | 335 | 3-299 | 755 | | | | |
| | | 887614 | 336 | 1-381 | 756 | Asp-53 to Arg-61, | | | |
| | | | | | | Thr-90 to Glu-95, | | | |
| | | | | | | Arg-108 to Gly-122. | | | |
| 108 | HSTBK14 | 887715 | 118 | 3-392 | 538 | | AR061: 3, AR089: 1 | | |
| | | | | | | | H0068: 1 and H0547: 1. | | |
| 109 | HE9RE21 | 1175067 | 119 | 852-394 | 539 | | AR089: 10, AR061: 3 | | |
| | | | | | | | H0556: 1, S0114: 1, | | |
| | | | | | | | S0134: 1, S0360: 1, | | |
| | | | | | | | T0082: 1, H0052: 1, | | |
| | | | | | | | H0644: 1, H0551: 1, | | |
| | | | | | | | L0770: 1, L0789: 1, | | |
| | | | | | | | H0144: 1, H0435: 1 and | | |
| | | | | | | | H0436: 1. | | |
| | | 888243 | 337 | 3-422 | 757 | Arg-3 to Ser-15, | | | |
| | | | | | | Ser-103 to Gln-111. | | | |
| 110 | HKAC115 | 892363 | 120 | 2-904 | 540 | Phe-66 to Thr-71, | AR089: 5, AR051: 3, | | |
| | | | | | | Ser-100 to Thr-108, | AR061: 2, AR054: 1 | | |
| | | | | | | Glu-116 to Gly-122, | L0748: 9, L0754: 6, | | |
| | | | | | | Ser-156 to Phe-169, | L0595: 6, L0659: 5, | | |
| | | | | | | Thr-177 to Ser-188, | H0046: 4, H0644: 4, | | |
| | | | | | | Ala-216 to Gly-221, | H0623: 4, H0521: 4, | | |
| | | | | | | Ser-264 to Ser-277, | H0556: 3, S0046: 3, | | |
| | | | | | | Pro-285 to Thr-296. | H0494: 3, L0764: 3, | | |
| | | | | | | | L0750: 3, L0759: 3, | | |
| | | | | | | | L0603: 3, H0295: 2, | | |
| | | | | | | | H0254: 2, S0045: 2, | | |
| | | | | | | | H0393: 2, H0370: 2, | | |
| | | | | | | | H0590: 2, H0622: 2, | | |
| | | | | | | | H0553: 2, H0264: 2, | | |
| | | | | | | | S0144: 2, S0142: 2, | | |
| | | | | | | | S0344: 2, S0002: 2, | | |
| | | | | | | | L0768: 2, L0783: 2, | | |
| | | | | | | | L0664: 2, S0374: 2, | | |
| | | | | | | | H0520: 2, H0547: 2, | | |
| | | | | | | | S0152: 2, L0740: 2, | | |
| | | | | | | | L0596: 2, H0294: 1, | | |
| | | | | | | | T0049: 1, H0255: 1, | | |
| | | | | | | | H0662: 1, H0638: 1, | | |
| | | | | | | | S0420: 1, S0356: 1, | | |
| | | | | | | | S0441: 1, S0354: 1, | | |
| | | | | | | | S0358: 1, H0580: 1, | | |
| | | | | | | | S0132: 1, H0619: 1, | | |
| | | | | | | | S0278: 1, S6022: 1, | | |
| | | | | | | | H0587: 1, H0331: 1, | | |
| | | | | | | | H0013: 1, H0575: 1, | | |
| | | | | | | | S0474: 1, H0581: 1, | | |
| | | | | | | | H0123: 1, H0050: 1, | | |
| | | | | | | | H0024: 1, S0051: 1, | | |
| | | | | | | | S0368: 1, H0031: 1, | | |
| | | | | | | | L0142: 1, H0617: 1, | | |
| | | | | | | | H0598: 1, H0634: 1, | | |
| | | | | | | | H0063: 1, H0268: 1, | | |
| | | | | | | | H0059: 1, H0100: 1, | | |
| | | | | | | | H0625: 1, H0396: 1, | | |
| | | | | | | | H0509: 1, H0641: 1, | | |
| | | | | | | | H0647: 1, H0646: 1, | | |
| | | | | | | | H0649: 1, H0652: 1, | | |
| | | | | | | | H0538: 1, L0763: 1, | | |
| | | | | | | | L0646: 1, L0662: 1, | | |
| | | | | | | | L0363: 1, L0766: 1, | | |
| | | | | | | | L0649: 1, L0389: 1, | | |
| | | | | | | | L0774: 1, L0653: 1, | | |
| | | | | | | | L0655: 1, L0658: 1, | | |
| | | | | | | | L0636: 1, L0517: 1, | | |
| | | | | | | | L0790: 1, L0666: 1, | | |
| | | | | | | | S0310: 1, H0519: 1, | | |
| | | | | | | | H0593: 1, S0328: 1, | | |
| | | | | | | | H0518: 1, S0013: 1, | | |
| | | | | | | | S0044: 1, H0436: 1, | | |
| | | | | | | | L0743: 1, L0747: 1, | | |
| | | | | | | | L0749: 1, L0752: 1, | | |
| | | | | | | | L0581: 1, L0593: 1 and | | |
| | | | | | | | S0456: 1. | | |
| 111 | HRDBE43 | 894862 | 121 | 2-1297 | 541 | Gln-34 to Arg-40, | AR054: 17, AR061: 7, | | |
| | | | | | | Arg-65 to Asp-70, | AR051: 4, AR089: 3, | | |
| | | | | | | Pro-163 to Gly-173, | AR050: 2 | | |
| | | | | | | Gly-220 to Asp-232, | L0776: 5, L0748: 5, | | |
| | | | | | | Tyr-260 to Ile-268, | L0794: 4, H0156: 2, | | |
| | | | | | | Gly-296 to Ser-304, | H0616: 2, L0805: 2, | | |
| | | | | | | Ser-334 to Arg-339, | L0777: 2, T0082: 1, | | |
| | | | | | | Arg-347 to Gly-352, | H0124: 1, H0591: 1, | | |
| | | | | | | Tyr-359 to Ser-366, | H0561: 1, L0639: 1, | | |
| | | | | | | Thr-391 to Met-396. | L0637: 1, L0764: 1, | | |
| | | | | | | | L0655: 1, L0659: 1, | | |
| | | | | | | | L0517: 1, L0809: 1, | | |
| | | | | | | | L0790: 1, H0658: 1, | | |
| | | | | | | | L0747: 1, L0749: 1, | | |
| | | | | | | | L0758: 1 and L0759: 1. | | |
| | | 947966 | 338 | 1287-574 | 758 | | | | |
| 112 | HSSKD85 | 908141 | 122 | 152-1081 | 542 | Gly-30 to Arg-38, | AR089: 5, AR061: 4 | | |
| | | | | | | Gln-62 to Tyr-67, | L0755: 8, H0013: 4, | | |
| | | | | | | His-80 to Tyr-85, | H0266: 4, L0747: 4, | | |
| | | | | | | Tyr-96 to Gly-112, | L0601: 4, S0026: 4, | | |
| | | | | | | Glu-134 to Ser-141, | H0038: 2, S0144: 2, | | |
| | | | | | | Ser-160 to Cys-166, | L0769: 2, L0774: 2, | | |
| | | | | | | Thr-173 to Trp-179, | L0517: 2, L0789: 2, | | |
| | | | | | | Gln-212 to Asp-222, | L0731: 2, L0758: 2, | | |
| | | | | | | Gly-225 to Gly-231, | H0445: 2, S0116: 1, | | |
| | | | | | | Gly-269 to Asp-276, | S0360: 1, H0580: 1, | | |
| | | | | | | Asn-303 to Asn-310. | S0222: 1, H0635: 1, | | |
| | | | | | | | H0581: 1, H0545: 1, | | |
| | | | | | | | H0457: 1, S0250: 1, | | |
| | | | | | | | H0617: 1, H0124: 1, | | |
| | | | | | | | H0316: 1, H0135: 1, | | |
| | | | | | | | H0538: 1, L0761: 1, | | |
| | | | | | | | L0764: 1, L0766: 1, | | |
| | | | | | | | L0803: 1, L0804: 1, | | |
| | | | | | | | L0657: 1, L0659: 1, | | |
| | | | | | | | L0782: 1, L0383: 1, | | |
| | | | | | | | L0809: 1, L0368: 1, | | |
| | | | | | | | L0665: 1, H0519: 1, | | |
| | | | | | | | S0330: 1, S0028: 1, | | |
| | | | | | | | L0740: 1, L0749: 1, | | |
| | | | | | | | L0750: 1, L0777: 1, | | |
| | | | | | | | L0757: 1, L0591: 1, | | |
| | | | | | | | L0599: 1, S0194: 1 and | | |
| | | | | | | | S0276: 1. | | |
| 113 | HFOXL77 | 910698 | 123 | 102-569 | 543 | Gln-8 to Ala-13, | AR089: 10, AR061: 2 | | |
| | | | | | | Ser-46 to Thr-51, | L0439: 7, L0438: 4, | | |
| | | | | | | Asn-77 to Cys-95, | L0744: 4, L0596: 4, | | |
| | | | | | | Thr-112 to Gly-118. | S0010: 3, L0776: 3, | | |
| | | | | | | | L0517: 3, L0731: 3, | | |
| | | | | | | | L0599: 3, H0677: 3, | | |
| | | | | | | | H0265: 2, H0556: 2, | | |
| | | | | | | | S0222: 2, H0031: 2, | | |
| | | | | | | | H0673: 2, H0169: 2, | | |
| | | | | | | | L0761: 2, L0659: 2, | | |
| | | | | | | | S0126: 2, L0748: 2, | | |
| | | | | | | | L0747: 2, L0591: 2, | | |
| | | | | | | | S0194: 2, S0276: 2, | | |
| | | | | | | | H0650: 1, H0341: 1, | | |
| | | | | | | | H0255: 1, S0418: 1, | | |
| | | | | | | | L0005: 1, S0360: 1, | | |
| | | | | | | | S0046: 1, H0632: 1, | | |
| | | | | | | | L0622: 1, T0060: 1, | | |
| | | | | | | | H0122: 1, S0346: 1, | | |
| | | | | | | | H0581: 1, S0049: 1, | | |
| | | | | | | | H0024: 1, H0017: 1, | | |
| | | | | | | | H0071: 1, T0006: 1, | | |
| | | | | | | | L0142: 1, L0456: 1, | | |
| | | | | | | | S0036: 1, H0551: 1, | | |
| | | | | | | | S0386: 1, H0100: 1, | | |
| | | | | | | | H0494: 1, L0770: 1, | | |
| | | | | | | | L0769: 1, L0638: 1, | | |
| | | | | | | | L0772: 1, L0800: 1, | | |
| | | | | | | | L0766: 1, L0666: 1, | | |
| | | | | | | | L0664: 1, H0683: 1, | | |
| | | | | | | | H0660: 1, H0521: 1, | | |
| | | | | | | | S0027: 1, L0779: 1, | | |
| | | | | | | | L0777: 1, L0753: 1, | | |
| | | | | | | | L0755: 1, L0758: 1, | | |
| | | | | | | | H0445: 1 and H0667: 1. | | |
| 114 | HBXCZ29 | 910842 | 124 | 404-733 | 544 | Thr-27 to Ser-32. | AR054: 10, AR050: 2, | | |
| | | | | | | | AR061: 1, AR089: 1, | | |
| | | | | | | | AR051: 0 | | |
| | | | | | | | L0756: 5, S0222: 1, | | |
| | | | | | | | H0591: 1, T0067: 1, | | |
| | | | | | | | S0038: 1 and L0485: 1. | | |
| 115 | HNTMB90 | 910934 | 125 | 3-533 | 545 | Pro-18 to Pro-27, | AR051: 2, AR050: 1, | | |
| | | | | | | Leu-34 to Lys-39, | AR054: 1, AR061: 1, | | |
| | | | | | | Lys-90 to Pro-95. | AR089: 1 | | |
| | | | | | | | H0519: 2, H0046: 1, | | |
| | | | | | | | L0803: 1, H0520: 1 and | | |
| | | | | | | | L0758: 1. | | |
| 116 | HMKCH92 | 910936 | 126 | 78-704 | 546 | Pro-32 to Glu-37, | AR089: 1, AR061: 1 | 3p26-p25 | 154705, |
| | | | | | | Gly-56 to Ser-61, | L0439: 4, H0392: 1 | | 193300, |
| | | | | | | Gly-144 to Arg-149, | and L0749: 1. | | 193300, |
| | | | | | | Glu-161 to Gly-168, | | | 227646, |
| | | | | | | Thr-182 to Lys-187. | | | 253260, |
| | | | | | | | | | 278720, |
| | | | | | | | | | 601154, |
| | | | | | | | | | 601253, |
| | | | | | | | | | 602011 |
| 117 | HTELV86 | 910946 | 127 | 1-927 | 547 | Thr-5 to Ser-11, | AR089: 7, AR061: 6 | | |
| | | | | | | Asp-78 to His-85, | H0616: 4, H0038: 1, | | |
| | | | | | | Ser-153 to Ser-162, | L0745: 1 and L0779: 1. | | |
| | | | | | | Glu-221 to Ala-234, | | | |
| | | | | | | Gly-247 to Glu-252. | | | |
| 118 | HNTAF23 | 910947 | 128 | 24-251 | 548 | His-1 to Gly-12, | AR089: 2, AR061: 1 | | |
| | | | | | | Trp-69 to Glu-75. | L0439: 4, S0192: 3, | | |
| | | | | | | | L0776: 2, L0438: 2, | | |
| | | | | | | | L0777: 2, H0254: 1, | | |
| | | | | | | | L0534: 1, H0333: 1, | | |
| | | | | | | | L0763: 1, H0519: 1, | | |
| | | | | | | | H0593: 1, L0750: 1, | | |
| | | | | | | | L0779: 1 and L0758: 1. | | |
| 119 | HDDAF49 | 1127877 | 129 | 364-615 | 549 | | AR061: 9, AR089: 3 | | |
| | | | | | | | H0339: 1 | | |
| | | 911314 | 339 | 144-320 | 759 | Glu-15 to Ser-24. | | | |
| 120 | HHEZT58 | 911416 | 130 | 1-558 | 550 | Glu-9 to Lys-14, | AR089: 8, AR061: 3 | | |
| | | | | | | Gln-51 to Gln-57. | L0794: 3, L0758: 2, | | |
| | | | | | | | L0759: 2, H0624: 1, | | |
| | | | | | | | L0717: 1, T0082: 1, | | |
| | | | | | | | H0581: 1, H0553: 1, | | |
| | | | | | | | H0038: 1, T0067: 1, | | |
| | | | | | | | L0665: 1, H0436: 1, | | |
| | | | | | | | L0439: 1, L0745: 1 and | | |
| | | | | | | | H0543: 1. | | |
| 121 | HETEY43 | 1227646 | 131 | 1-1710 | 551 | Glu-9 to Asp-15, | AR061: 1, AR089: 0 | | |
| | | | | | | Ser-58 to Leu-64, | L0758: 19, L0777: 16, | | |
| | | | | | | Glu-127 to Ser-136, | L0750: 14, L0747: 13, | | |
| | | | | | | Gly-155 to Pro-163, | L0748: 10, H0692: 9, | | |
| | | | | | | Glu-183 to Ile-189, | L0775: 6, L0749: 6, | | |
| | | | | | | Leu-197 to Asp-202, | L0766: 5, L0774: 5, | | |
| | | | | | | Thr-211 to Arg-226, | L0740: 5, L0752: 5, | | |
| | | | | | | Pro-260 to Gln-265, | L0764: 4, L0662: 4, | | |
| | | | | | | Pro-315 to Leu-330, | S0126: 4, L0601: 4, | | |
| | | | | | | Pro-335 to Thr-341, | H0624: 3, H0052: 3, | | |
| | | | | | | His-415 to Gln-421, | H0090: 3, H0560: 3, | | |
| | | | | | | Val-473 to Phe-478, | L0769: 3, L0768: 3, | | |
| | | | | | | Pro-531 to Tyr-538, | L0783: 3, L0756: 3, | | |
| | | | | | | His-563 to Arg-570. | L0755: 3, H0171: 2, | | |
| | | | | | | | S0007: 2, H0497: 2, | | |
| | | | | | | | H0486: 2, H0316: 2, | | |
| | | | | | | | H0494: 2, S0150: 2, | | |
| | | | | | | | L0776: 2, L0655: 2, | | |
| | | | | | | | L0659: 2, L0665: 2, | | |
| | | | | | | | S0027: 2, L0759: 2, | | |
| | | | | | | | L0588: 2, H0136: 2, | | |
| | | | | | | | H0542: 2, H0341: 1, | | |
| | | | | | | | H0664: 1, H0458: 1, | | |
| | | | | | | | H0125: 1, S0418: 1, | | |
| | | | | | | | S0376: 1, S0360: 1, | | |
| | | | | | | | H0489: 1, S0046: 1, | | |
| | | | | | | | S0132: 1, S0300: 1, | | |
| | | | | | | | H0351: 1, H0601: 1, | | |
| | | | | | | | H0632: 1, H0013: 1, | | |
| | | | | | | | H0244: 1, H0069: 1, | | |
| | | | | | | | H0427: 1, H0318: 1, | | |
| | | | | | | | H0581: 1, H0421: 1, | | |
| | | | | | | | H0204: 1, H0327: 1, | | |
| | | | | | | | H0046: 1, S0388: 1, | | |
| | | | | | | | S0051: 1, S6028: 1, | | |
| | | | | | | | H0687: 1, S0003: 1, | | |
| | | | | | | | H0252: 1, H0615: 1, | | |
| | | | | | | | H0428: 1, T0006: 1, | | |
| | | | | | | | H0553: 1, L0055: 1, | | |
| | | | | | | | H0038: 1, H0551: 1, | | |
| | | | | | | | H0059: 1, H0100: 1, | | |
| | | | | | | | H0647: 1, S0142: 1, | | |
| | | | | | | | S0344: 1, H0529: 1, | | |
| | | | | | | | L0763: 1, L0770: 1, | | |
| | | | | | | | L0639: 1, L0761: 1, | | |
| | | | | | | | L0667: 1, L0641: 1, | | |
| | | | | | | | L0374: 1, L0767: 1, | | |
| | | | | | | | L0375: 1, L0383: 1, | | |
| | | | | | | | L0647: 1, L0792: 1, | | |
| | | | | | | | L0663: 1, L0664: 1, | | |
| | | | | | | | H0520: 1, H0547: 1, | | |
| | | | | | | | H0689: 1, H0682: 1, | | |
| | | | | | | | H0670: 1, S0378: 1, | | |
| | | | | | | | S0380: 1, H0555: 1, | | |
| | | | | | | | H0478: 1, S3012: 1, | | |
| | | | | | | | L0742: 1, L0439: 1, | | |
| | | | | | | | L0754: 1, L0731: 1, | | |
| | | | | | | | L0592: 1, L0608: 1, | | |
| | | | | | | | H0543: 1, H0422: 1 and | | |
| | | | | | | | H0352: 1. | | |
| | | 911466 | 340 | 174-575 | 760 | | | | |
| 122 | HWHQR10 | 1137770 | 132 | 894-1 | 552 | Pro-12 to Ala-17, | AR089: 0, AR061: 0 | | |
| | | | | | | Arg-23 to Thr-32, | L0794: 4, H0484: 1, | | |
| | | | | | | Ala-45 to Ala-59, | H0586: 1, H0587: 1, | | |
| | | | | | | Gly-66 to Arg-73, | H0581: 1, H0690: 1, | | |
| | | | | | | Gly-84 to Pro-90, | L0777: 1, L0593: 1 and | | |
| | | | | | | Pro-105 to Pro-158, | H0352: 1. | | |
| | | | | | | Glu-168 to Gly-173, | | | |
| | | | | | | Glu-207 to Ser-214, | | | |
| | | | | | | Gln-216 to Arg-223. | | | |
| | | 915008 | 341 | 1-324 | 761 | Ala-1 to Thr-24, | | | |
| | | | | | | Arg-45 to Arg-51. | | | |
| 123 | HAUA117 | 921674 | 133 | 118-780 | 553 | Lys-50 to Gly-55, | AR061: 2, AR089: 1 | | |
| | | | | | | Thr-78 to Val-78, | L0803: 6, L0748: 5, | | |
| | | | | | | Thr-85 to Arg-91, | L0749: 4, H0424: 3, | | |
| | | | | | | Pro-103 to Ser-112, | L0804: 3, L0774: 3, | | |
| | | | | | | Leu-199 to Ser-207, | L0779: 3, H0213: 2, | | |
| | | | | | | Pro-209 to Ser-214. | S0142: 2, L0789: 2, | | |
| | | | | | | | L0745: 2, L0731: 2, | | |
| | | | | | | | H0294: 1, H0254: 1, | | |
| | | | | | | | H0393: 1, H0549: 1, | | |
| | | | | | | | H0427: 1, H0156: 1, | | |
| | | | | | | | T0082: 1, H0052: 1, | | |
| | | | | | | | H0150: 1, H0024: 1, | | |
| | | | | | | | H0135: 1, H0268: 1, | | |
| | | | | | | | H0100: 1, S0344: 1, | | |
| | | | | | | | L0763: 1, L0769: 1, | | |
| | | | | | | | L0662: 1, L0775: 1, | | |
| | | | | | | | L0805: 1, L0657: 1, | | |
| | | | | | | | L0666: 1, H0144: 1, | | |
| | | | | | | | L0740: 1, L0750: 1 and | | |
| | | | | | | | L0755: 1. | | |
| 124 | HORBP08 | 1220903 | 134 | 2-5299 | 554 | Ser-12 to Ser-21, | AR051: 13, AR050: 10, | | |
| | | | | | | Cys-24 to Pro-30, | AR061: 5, AR089: 2, | | |
| | | | | | | Arg-45 to Leu-56, | AR054: 1 | | |
| | | | | | | Pro-62 to Gly-71, | S0250: 3, L0803: 3, | | |
| | | | | | | Lys-85 to Ser-98, | L0740: 3, L0747: 3, | | |
| | | | | | | Cys-114 to His-123, | L0794: 2, L0751: 2, | | |
| | | | | | | Ser-133 to Cys-140, | L0779: 2, S0194: 2, | | |
| | | | | | | Thr-163 to Ser-169, | H0013: 1, H0253: 1, | | |
| | | | | | | Val-191 to Gly-197, | T0115: 1, H0292: 1, | | |
| | | | | | | Arg-210 to Gln-216, | H0561: 1, L0769: 1, | | |
| | | | | | | Thr-256 to Leu-262, | L0768: 1, L0809: 1, | | |
| | | | | | | Arg-321 to Asp-326, | H0593: 1, S0126: 1, | | |
| | | | | | | Tyr-346 to Asn-351, | S0027: 1, S0028: 1, | | |
| | | | | | | Pro-363 to Asn-376, | L0777: 1 and L0759: 1. | | |
| | | | | | | His-470 to Cys-478, | | | |
| | | | | | | Pro-480 to Lys-487, | | | |
| | | | | | | Pro-495 to Leu-503, | | | |
| | | | | | | Lys-513 to Leu-518. | | | |
| | | 926702 | 342 | 3-1937 | 762 | Pro-6 to Ser-11, | | | |
| | | | | | | Leu-28 to Thr-48, | | | |
| | | | | | | Arg-205 to Gly-211, | | | |
| | | | | | | Ser-227 to Gly-232, | | | |
| | | | | | | Cys-386 to Arg-395, | | | |
| | | | | | | Cys-423 to Ser-430, | | | |
| | | | | | | Gly-566 to Arg-574, | | | |
| 116 | HMKCH92 | 910936 | 126 | 78-704 | 546 | Pro-32 to Glu-37, | AR089: 1, AR061: 1 | 3p26 | |
| | | | | | | Arg-581 to Val-586, | | | |
| | | | | | | Pro-595 to Asn-604, | | | |
| | | | | | | Pro-607 to Arg-618, | | | |
| | | | | | | Gln-633 to Cys-638. | | | |
| | | 962906 | 343 | 350-3 | 763 | Leu-14 to Thr-34. | | | |
| 125 | HKGDI91 | 1111281 | 135 | 82-537 | 555 | Asp-1 to Ser-6, | AR089: 19, AR061: 2 | | |
| | | | | | | Ser-20 to Phe-25, | S0007: 1, H0318: 1, | | |
| | | | | | | Gln-33 to Phe-39, | H0538: 1 and H0547: 1. | | |
| | | | | | | Ser-91 to Asp-98, | | | |
| | | | | | | Pro-104 to Gly-119, | | | |
| | | | | | | Pro-133 to Trp-143. | | | |
| | | 927222 | 344 | 81-446 | 764 | Asp-1 to Ser-6, | | | |
| | | | | | | Ser-20 to Phe-25, | | | |
| | | | | | | Gln-33 to Phe-39, | | | |
| | | | | | | Ser-91 to Asp-98, | | | |
| | | | | | | Pro-104 to Gly-110, | | | |
| | | | | | | Asn-114 to Trp-120. | | | |
| 126 | HNHNP81 | 928378 | 136 | 143-514 | 556 | Ile-1 to Ser-16. | AR051: 23, AR054: 11, | | |
| | | | | | | | 11, AR050: 9, AR061: | | |
| | | | | | | | 8, AR089: 5 | | |
| | | | | | | | S0216: 1 | | |
| 127 | HFIDL68 | 928475 | 137 | 2-529 | 5557 | Gly-40 to Lys-46, | AR089: 7, AR061: 4, | | |
| | | | | | | Phe-120 to Ser-132. | AR050: 2, AR054: 2, | | |
| | | | | | | | AR051: 1 | | |
| | | | | | | | S0192: 1 | | |
| 128 | HLWFG82 | 1182318 | 138 | 1-609 | 558 | Pro-4 to Pro-18, | AR054: 2, AR051: 1, | | |
| | | | | | | Gly-81 to Pro-87, | AR089: 1, AR050: 1, | | |
| | | | | | | Gln-127 to Ala-139, | AR061: 0 | | |
| | | | | | | Glu-158 to Phe-164, | H0651: 59, L0751: 5, | | |
| | | | | | | Glu-177 to Gly-182, | L0438: 4, L0774: 3, | | |
| | | | | | | Leu-185 to Arg-190. | L0439: 3, L0748: 2, | | |
| | | | | | | | L0779: 2, L0752: 2, | | |
| | | | | | | | L0755: 2, L0595: 2, | | |
| | | | | | | | H0295: 1, H0009: 1, | | |
| | | | | | | | T0010: 1, H0553: 1, | | |
| | | | | | | | H0617: 1, H0163: 1, | | |
| | | | | | | | H0102: 1, H0494: 1, | | |
| | | | | | | | L0770: 1, L0662: 1, | | |
| | | | | | | | L0375: 1, L0806: 1, | | |
| | | | | | | | L0776: 1, L0657: 1, | | |
| | | | | | | | L0659: 1, L0792: 1, | | |
| | | | | | | | L0666: 1, L0663: 1, | | |
| | | | | | | | L0664: 1, L0665: 1, | | |
| | | | | | | | L0352: 1, H0648: 1, | | |
| | | | | | | | L0740: 1, L0749: 1, | | |
| | | | | | | | L0757: 1, L0361: 1, | | |
| | | | | | | | L0603: 1 and S0042: 1. | | |
| | | 929647 | 345 | 1-558 | 765 | Pro-4 to Pro-18, | | | |
| | | | | | | Gly-81 to Pro-87, | | | |
| | | | | | | Ala-110 to Ala-118, | | | |
| | | | | | | Gln-127 to Gly-143, | | | |
| | | | | | | Arg-168 to Asp-176. | | | |
| 129 | HCHON59 | 931082 | 139 | 511-1344 | 559 | Gln-93 to Thr-99, | AR089: 1, AR061: 0 | | |
| | | | | | | Pro-124 to Gln-129, | L0748: 8, L0439: 6, | | |
| | | | | | | Glu-153 to Leu-159, | L0766: 4, L0803: 4, | | |
| | | | | | | Gln-162 to Gly-168, | L0749: 3, S0358: 2, | | |
| | | | | | | Ser-198 to Gly-203, | H0574: 2, H0327: 2, | | |
| | | | | | | Lys-210 to Asn-215, | H0539: 2, L0758: 2, | | |
| | | | | | | Gly-219 to Gln-224. | S0026: 2, S0212: 1, | | |
| | | | | | | | H0484: 1, S0354: 1, | | |
| | | | | | | | S0046: 1, H0592: 1, | | |
| | | | | | | | T0114: 1, H0427: 1, | | |
| | | | | | | | H0590: 1, H0581: 1, | | |
| | | | | | | | H0046: 1, H0081: 1, | | |
| | | | | | | | H0015: 1, H0051: 1, | | |
| | | | | | | | T0006: 1, H0040: 1, | | |
| | | | | | | | H0258: 1, S0438: 1, | | |
| | | | | | | | S0422: 1, H0529: 1, | | |
| | | | | | | | L0763: 1, L0770: 1, | | |
| | | | | | | | L0662: 1, L0794: 1, | | |
| | | | | | | | L0649: 1, L0775: 1, | | |
| | | | | | | | L0515: 1, L0792: 1, | | |
| | | | | | | | H0520: 1, H0547: 1, | | |
| | | | | | | | H0435: 1, S0328: 1, | | |
| | | | | | | | S0380: 1, S0152: 1, | | |
| | | | | | | | H0521: 1, L0356: 1, | | |
| | | | | | | | L0747: 1, L0753: 1, | | |
| | | | | | | | L0485: 1 and H0423:1. | | |
| 130 | HEEAR06 | 1125913 | 140 | 419-3 | 560 | Ser-1 to Gly-10, | AR061: 3, AR089: 2 | | |
| | | | | | | Gln-103 to Pro-108. | L0759: 3, L0604: 3, | | |
| | | | | | | | L0717: 2, H0549: 2, | | |
| | | | | | | | L0748: 2, S0366: 1 and | | |
| | | | | | | | L0749: 1. | | |
| | | 934722 | 346 | 51-572 | 766 | Ala-32 to Ala-38, | | | |
| | | | | | | Lys-73 to Glu-79. | | | |
| 131 | HHPTE06 | 1182278 | 141 | 1-843 | 561 | Leu-23 to Tyr-28, | AR054: 44, AR050: 38, | | |
| | | | | | | Thr-38 to Tyr-43, | AR051: 3, AR061: 4, | | |
| | | | | | | Gln-48 to Tyr-55, | AR089: 2 | | |
| | | | | | | Gly-91 to Ser-98, | L0803: 4, L0756: 4, | | |
| | | | | | | Pro-104 to Gln-113, | L0777: 4, S0242: 4, | | |
| | | | | | | Thr-121 to Gly-126, | H0171: 2, S0212: 2, | | |
| | | | | | | Glu-129 to Asn-134, | S0222: 2, S0010: 2, | | |
| | | | | | | Lys-186 to Gln-195. | S0250: 2, H0144: 2, | | |
| | | | | | | | L0731: 2, H0170: 1, | | |
| | | | | | | | H0341: 1, L0021: 1, | | |
| | | | | | | | H0581: 1, H0457: 1, | | |
| | | | | | | | H0563: 1, H0567: 1, | | |
| | | | | | | | S0050: 1, S0214: 1, | | |
| | | | | | | | S0366: 1, H0551: 1, | | |
| | | | | | | | T0004: 1, S0038: 1, | | |
| | | | | | | | S0112: 1, H0538: 1, | | |
| | | | | | | | L0796: 1, L0768: 1, | | |
| | | | | | | | L0774: 1, L0659: 1, | | |
| | | | | | | | L0530: 1, L0666: 1, | | |
| | | | | | | | L0366: 1 and H0506: 1. | | |
| | | 934755 | 347 | 2-190 | 767 | Leu-20 to Tyr-25, | | | |
| | | | | | | Thr-35 to Tyr-40, | | | |
| | | | | | | Gln-45 to Thr-52. | | | |
| 132 | HCHNJ32 | 1219115 | 142 | 2-763 | 562 | | AR061: 113, AR089: 26 | | |
| | | | | | | | L0748: 15, L0581: 11, | | |
| | | | | | | | H0510: 9, H0617: 9, | | |
| | | | | | | | L0755: 7, H0484: 6, | | |
| | | | | | | | H0673: 6, L0769: 6, | | |
| | | | | | | | L0758: 5, S0278: 4, | | |
| | | | | | | | H0327: 4, H0124: 4, | | |
| | | | | | | | L0774: 4, L0526: 4, | | |
| | | | | | | | L0751: 4, H0549: 3, | | |
| | | | | | | | H0370: 3, H0150: 3, | | |
| | | | | | | | L0771: 3, L0518: 3, | | |
| | | | | | | | L0756: 3, L0777: 3, | | |
| | | | | | | | L0759: 3, H0295: 2, | | |
| | | | | | | | H0341: 2, H0125: 2, | | |
| | | | | | | | S0418: 2, H0676: 2, | | |
| | | | | | | | H0550: 2, H0391: 2, | | |
| | | | | | | | H0331: 2, H0559: 2, | | |
| | | | | | | | H0199: 2, H0424: 2, | | |
| | | | | | | | H0509: 2, H0529: 2, | | |
| | | | | | | | L0803: 2, L0517: 2, | | |
| | | | | | | | L0529: 2, L0789: 2, | | |
| | | | | | | | L0665: 2, S0328: 2, | | |
| | | | | | | | H0696: 2, L0743: 2, | | |
| | | | | | | | L0753: 2, S0434: 2, | | |
| | | | | | | | L0596: 2, H0624: 1, | | |
| | | | | | | | H0584: 1, L0002: 1, | | |
| | | | | | | | H0657: 1, S0420: 1, | | |
| | | | | | | | S0376: 1, S0360: 1, | | |
| | | | | | | | H0637: 1, S0046: 1, | | |
| | | | | | | | H0574: 1, H0632: 1, | | |
| | | | | | | | L0622: 1, L0623: 1, | | |
| | | | | | | | H0486: 1, H0156: 1, | | |
| | | | | | | | L0021: 1, H0599: 1, | | |
| | | | | | | | H0618: 1, H0253: 1, | | |
| | | | | | | | H0390: 1, H0052: 1, | | |
| | | | | | | | H0184: 1, T0110: 1, | | |
| | | | | | | | H0086: 1, H0197: 1, | | |
| | | | | | | | H0014: 1, H0083: 1, | | |
| | | | | | | | H0355: 1, S0318: 1, | | |
| | | | | | | | S0316: 1, H0687: 1, | | |
| | | | | | | | H0615: 1, H0428: 1, | | |
| | | | | | | | H0604: 1, H0181: 1, | | |
| | | | | | | | H0606: 1, H0032: 1, | | |
| | | | | | | | H0674: 1, S0036: 1, | | |
| | | | | | | | H0090: 1, H0038: 1, | | |
| | | | | | | | H0616: 1, H0087: 1, | | |
| | | | | | | | H0413: 1, H0129: 1, | | |
| | | | | | | | H0494: 1, S0144: 1, | | |
| | | | | | | | S0142: 1, S0344: 1, | | |
| | | | | | | | L0520: 1, L0763: 1, | | |
| | | | | | | | L0638: 1, L0772: 1, | | |
| | | | | | | | L0372: 1, L0768: 1, | | |
| | | | | | | | L0794: 1, L0766: 1, | | |
| | | | | | | | L0775: 1, L0607: 1, | | |
| | | | | | | | L0657: 1, L0783: 1, | | |
| | | | | | | | L0384: 1, L0809: 1, | | |
| | | | | | | | L0519: 1, L0543: 1, | | |
| | | | | | | | L0368: 1, S0052: 1, | | |
| | | | | | | | S0374: 1, H0689: 1, | | |
| | | | | | | | H0539: 1, S0378: 1, | | |
| | | | | | | | H0521: 1, H0694: 1, | | |
| | | | | | | | S0188: 1, H0134: 1, | | |
| | | | | | | | S3014: 1, S0027: 1, | | |
| | | | | | | | L0744: 1, L0745: 1, | | |
| | | | | | | | L0752: 1, H0595: 1, | | |
| | | | | | | | L0605: 1, L0604: 1, | | |
| | | | | | | | H0136: 1 and H0543: 1. | | |
| | | 934848 | 348 | 3-764 | 768 | Thr-1 to Ser-9, | | | |
| | | | | | | Ser-146 to Thr-154, | | | |
| | | | | | | Thr-200 to Lys-208. | | | |
| 133 | HCECQ23 | 938398 | 143 | 810-289 | 563 | Pro-26 ro Tyr-31. | AR089: 1, AR061: 0 | | |
| | | | | | | | L0769: 3, H0052: 2, | | |
| | | | | | | | L0439: 2, H0572: 1, | | |
| | | | | | | | H0015: 1, L0438: 1 and | | |
| | | | | | | | L0741: 1. | | |
| 134 | HETIY94 | 1200480 | 144 | 3-1292 | 564 | Pro-34 to Glu-44, | AR050: 22, AR054: 18, | | |
| | | | | | | Ala-126 to Ser-133, | AR051: 11, AR089: 4, | | |
| | | | | | | Gln-158 to Pro-164, | AR061: 3 | | |
| | | | | | | Pro-188 to Phe-194, | L0751: 2, L0803: 1, | | |
| | | | | | | Ser-224 to Leu-233, | L0805: 1, S0374: 1, | | |
| | | | | | | Leu-248 to His-254, | H0658: 1 and L0747: 1. | | |
| | | | | | | Glu-263 to Lys-270, | | | |
| | | | | | | Arg-276 to Asn-293, | | | |
| | | | | | | His-298 to Leu-305, | | | |
| | | | | | | Pro-309 to Trp-316, | | | |
| | | | | | | Pro-318 to Pro-355, | | | |
| | | | | | | Trp-363 to Trp-376, | | | |
| | | | | | | Ala-378 to Arg-397, | | | |
| | | | | | | Pro-403 to Gly-425. | | | |
| | | 940755 | 349 | 1-612 | 769 | Arg-1 to Gly-6, | | | |
| | | | | | | Pro-44 to Glu-54, | | | |
| | | | | | | Ala-136 to Gln-141. | | | |
| 135 | HNHCP79 | 565781 | 145 | 23-301 | 565 | Gly-16 to Asn-21. | AR051: 9, AR054: 9, | | |
| | | | | | | | AR050: 7, AR061: 3, | | |
| | | | | | | | AR089: 2 | | |
| | | | | | | | H0274: 26, H0521: 26, | | |
| | | | | | | | H0046: 20, L0747: 20, | | |
| | | | | | | | S0278: 14, S0052: 14, | | |
| | | | | | | | L0754: 12, L0599: 12, | | |
| | | | | | | | S0142: 11, S0428: 11, | | |
| | | | | | | | H0179: 10, S0344: 10, | | |
| | | | | | | | L0776: 9, H0638: 8, | | |
| | | | | | | | L0771: 8, L0666: 8, | | |
| | | | | | | | S0360: 7, S0144: 7, | | |
| | | | | | | | L0775: 7, L0659: 7, | | |
| | | | | | | | H0422: 7, S0354: 6, | | |
| | | | | | | | H0580: 6, H0622: 6, | | |
| | | | | | | | H0641: 6, H0522: 6, | | |
| | | | | | | | L0740: 6, L0595: 6, | | |
| | | | | | | | H0581: 5, H0416: 5, | | |
| | | | | | | | H0673: 5, L0598: 5, | | |
| | | | | | | | L0774: 5, S3014: 5, | | |
| | | | | | | | L0777: 5, L0759: 5, | | |
| | | | | | | | L0362: 5, H0423: 5, | | |
| | | | | | | | H0069: 4, H0674: 4, | | |
| | | | | | | | L0770: 4, L0769: 4, | | |
| | | | | | | | L0750: 4, L0752: 4, | | |
| | | | | | | | L0731: 4, L0757: 4, | | |
| | | | | | | | L0603: 4, S0114: 3, | | |
| | | | | | | | S0134: 3, S0116: 3, | | |
| | | | | | | | H0341: 3, S0418: 3, | | |
| | | | | | | | S0358: 3, H0545: 3, | | |
| | | | | | | | H0050: 3, H0646: 3, | | |
| | | | | | | | L0768: 3, L0664: 3, | | |
| | | | | | | | S0053: 3, S0216: 3, | | |
| | | | | | | | S0374: 3, S0404: 3, | | |
| | | | | | | | S0206: 3, L0745: 3, | | |
| | | | | | | | L0756: 3, L0581: 3, | | |
| | | | | | | | H0170: 2, H0222: 2, | | |
| | | | | | | | L0785: 2, H0663: 2, | | |
| | | | | | | | S0376: 2, S0132: 2, | | |
| | | | | | | | S0222: 2, H0370: 2, | | |
| | | | | | | | H0486: 2, H0013: 2, | | |
| | | | | | | | H0635: 2, S0280: 2, | | |
| | | | | | | | H0575: 2, H0036: 2, | | |
| | | | | | | | H0618: 2, H0597: 2, | | |
| | | | | | | | H0014: 2, H0039: 2, | | |
| | | | | | | | L0142: 2, H0551: 2, | | |
| | | | | | | | H0056: 2, H0561: 2, | | |
| | | | | | | | S0426: 2, L0763: 2, | | |
| | | | | | | | L0761: 2, L0648: 2, | | |
| | | | | | | | L0662: 2, L0767: 2, | | |
| | | | | | | | L0655: 2, L0519: 2, | | |
| | | | | | | | L0665: 2, H0519: 2, | | |
| | | | | | | | H0435: 2, H0696: 2, | | |
| | | | | | | | S0027: 2, L0743: 2, | | |
| | | | | | | | L0751: 2, S0031: 2, | | |
| | | | | | | | S0260: 2, H0445: 2, | | |
| | | | | | | | S0434: 2, L0590: 2, | | |
| | | | | | | | S0276: 2, H0395: 1, | | |
| | | | | | | | H0556: 1, T0002: 1, | | |
| | | | | | | | H0685: 1, S0040: 1, | | |
| | | | | | | | H0294: 1, S0218: 1, | | |
| | | | | | | | S0001: 1, H0484: 1, | | |
| | | | | | | | H0483: 1, H0662: 1, | | |
| | | | | | | | H0176: 1, H0589: 1, | | |
| | | | | | | | H0459: 1, S0356: 1, | | |
| | | | | | | | S0408: 1, S0410: 1, | | |
| | | | | | | | L0717: 1, H0411: 1, | | |
| | | | | | | | H0549: 1, H0550: 1, | | |
| | | | | | | | H0431: 1, H0608: 1, | | |
| | | | | | | | H0409: 1, H0404: 1, | | |
| | | | | | | | H0587: 1, H0485: 1, | | |
| | | | | | | | H0250: 1, L0021: 1, | | |
| | | | | | | | H0590: 1, H0318: 1, | | |
| | | | | | | | T0071: 1, H0421: 1, | | |
| | | | | | | | H0263: 1, H0596: 1, | | |
| | | | | | | | H0150: 1, H0009: 1, | | |
| | | | | | | | L0471: 1, H0011: 1, | | |
| | | | | | | | S0051: 1, H0083: 1, | | |
| | | | | | | | H0510: 1, H0594: 1, | | |
| | | | | | | | S0318: 1, H0687: 1, | | |
| | | | | | | | H0286: 1, S0250: 1, | | |
| | | | | | | | H0328: 1, H0553: 1, | | |
| | | | | | | | L0055: 1, H0032: 1, | | |
| | | | | | | | H0169: 1, H0316: 1, | | |
| | | | | | | | H0135: 1, H0090: 1, | | |
| | | | | | | | H0591: 1, H0634: 1, | | |
| | | | | | | | H0413: 1, H0623: 1, | | |
| | | | | | | | H0059: 1, T0069: 1, | | |
| | | | | | | | S0038: 1, H0100: 1, | | |
| | | | | | | | T0041: 1, H0509: 1, | | |
| | | | | | | | S0150: 1, H0633: 1, | | |
| | | | | | | | S0002: 1, H0529: 1, | | |
| | | | | | | | L0762: 1, L0667: 1, | | |
| | | | | | | | L0772: 1, L0646: 1, | | |
| | | | | | | | L0643: 1, L0521: 1, | | |
| | | | | | | | L0766: 1, L0389: 1, | | |
| | | | | | | | L0653: 1, L0629: 1, | | |
| | | | | | | | L0527: 1, L0657: 1, | | |
| | | | | | | | L0517: 1, L0384: 1, | | |
| | | | | | | | L0809: 1, L0663: 1, | | |
| | | | | | | | H0144: 1, H0697: 1, | | |
| | | | | | | | S0126: 1, H0690: 1, | | |
| | | | | | | | H0670: 1, H0648: 1, | | |
| | | | | | | | S0378: 1, S0380: 1, | | |
| | | | | | | | H0518: 1, S0152: 1, | | |
| | | | | | | | S0013: 1, S0044: 1, | | |
| | | | | | | | H0214: 1, H0555: 1, | | |
| | | | | | | | H0436: 1, H0478: 1, | | |
| | | | | | | | S0432: 1, S3012: 1, | | |
| | | | | | | | S0032: 1, L0744: 1, | | |
| | | | | | | | L0439: 1, L0779: 1, | | |
| | | | | | | | L0758: 1, S0308: 1, | | |
| | | | | | | | S0436: 1, L0591: 1, | | |
| | | | | | | | L0593: 1, S0011: 1, | | |
| | | | | | | | H0543: 1 and S0458: 1. | | |
| | | 775293 | 350 | 138-275 | 770 | | | | |
| | | 941862 | 351 | 2-748 | 771 | | | | |
| 136 | HEOOA49 | 942561 | 146 | 1-576 | 556 | Leu-42 to Asp-50, | AR089: 1, AR061: 2 | | |
| | | | | | | Pro-94 to Ala-100, | H0457: 1 | | |
| | | | | | | Ser-169 to Gly-174. | | | |
| 137 | HFKKN77 | 943757 | 147 | 145-684 | 567 | Thr-9 to Val-16. | AR061: 6, AR089: 2 | | |
| | | | | | | | H0620: 2, H0024: 2, | | |
| | | | | | | | H0208: 1, S0222: 1, | | |
| | | | | | | | H0194: 1, H0123: 1, | | |
| | | | | | | | H0051: 1 and S0052: 1. | | |
| 138 | HLCMP75 | 1213792 | 148 | 3-1448 | 568 | Asn-7 to Ser-16, | AR051: 1, AR050: 1, | | |
| | | | | | | Pro-30 to Ser-35, | AR054: 1, AR061: 1, | | |
| | | | | | | Ala-90 to Ala-100, | AR089: 1 | | |
| | | | | | | Pro-103 to Cys-108, | H0545: 9, H0333: 4, | | |
| | | | | | | Pro-110 to His-119, | L0754: 4, H0544: 3, | | |
| | | | | | | Pro-126 to Glu-139. | H0546: 3, L0794: 3, | | |
| | | | | | | | L0743: 3, L0744: 3, | | |
| | | | | | | | L0757: 3, S0212: 2, | | |
| | | | | | | | S0360: 2, H0619: 2, | | |
| | | | | | | | H0124: 2, L0771: 2, | | |
| | | | | | | | L0521: 2, S0027: 2, | | |
| | | | | | | | L0751: 2, L0777: 2, | | |
| | | | | | | | L0605: 2, H0550: 1, | | |
| | | | | | | | L0623: 1, H0013: 1, | | |
| | | | | | | | H0150: 1, H0086: 1, | | |
| | | | | | | | H0123: 1, H0288: 1, | | |
| | | | | | | | H0553: 1, H0644: 1, | | |
| | | | | | | | H0628: 1, H0181: 1, | | |
| | | | | | | | H0163: 1, H0087: 1, | | |
| | | | | | | | H0100: 1, L0803: 1, | | |
| | | | | | | | L0655: 1, L0656: 1, | | |
| | | | | | | | L0659: 1, L0384: 1, | | |
| | | | | | | | L0809: 1, L0565: 1, | | |
| | | | | | | | H0547: 1, H0658: 1, | | |
| | | | | | | | S0037: 1, S0028: 1, | | |
| | | | | | | | S0206: 1, L0603: 1 and | | |
| | | | | | | | H0665: 1, | | |
| | | 944722 | 352 | 2-946 | 772 | Ala-17 to Ala-27, | | | |
| | | | | | | Pro-30 to Cys-35, | | | |
| | | | | | | Pro-37 to His-46, | | | |
| | | | | | | Pro-53 to Glu-66, | | | |
| | | | | | | Asp-122 to Glu-131, | | | |
| | | | | | | Pro-163 to Gln-172. | | | |
| 139 | HDTBO48 | 945083 | 149 | 3-491 | 569 | | AR089: 39, AR061: 5 | | |
| | | | | | | | H0486: 2 | | |
| 140 | HWHQR25 | 1133921 | 150 | 1080-13 | 570 | Ala-1 to Ser-15, | AR054: 164, AR050: 143 | | |
| | | | | | | Ser-34 to Cys-46, | AR051: 118, | | |
| | | | | | | Pro-48 to Gln-62, | AR089: 1, AR061: 1 | | |
| | | | | | | Gly-97 to Gly-102, | L0794: 5, L0777: 4, | | |
| | | | | | | Arg-152 to Ala-157. | H0509: 2, L0772: 2, | | |
| | | | | | | | L0804: 2, H0144: 2, | | |
| | | | | | | | L0754: 2, L0747: 2, | | |
| | | | | | | | S0045: 1, S6022: 1, | | |
| | | | | | | | H0392: 1, H0592: 1, | | |
| | | | | | | | H0587: 1, H0486: 1, | | |
| | | | | | | | T0010: 1, H0623: 1, | | |
| | | | | | | | L0800: 1, L0643: 1, | | |
| | | | | | | | L0764: 1, L0768: 1, | | |
| | | | | | | | L0803: 1, L0653: 1, | | |
| | | | | | | | L0665: 1 and L0750: 1. | | |
| | | 947020 | 353 | 2-565 | 773 | Asn-7 to Thr-16, | | | |
| | | | | | | Cys-20 to Trp-26, | | | |
| | | | | | | Gln-33 to Asn-46, | | | |
| | | | | | | Ala-48 to Tyr-58, | | | |
| | | | | | | Glu-77 to Tyr-96. | | | |
| 141 | HBGMZ39 | 947112 | 151 | 575-3 | 571 | Arg-37 to Phe-48, | AR089: 15, AR061: 10 | | |
| | | | | | | Asp-55 to Asp-63, | H0617: 8, L0763: 2, | | |
| | | | | | | Gly-73 to Ala-80, | L0754: 2, H0483: 1 and | | |
| | | | | | | Gln-147 to Trp-154, L0743: 1. | | | |
| | | | | | | Val-176 to Lys-191. | | | |
| 142 | HSDFT51 | 1126334 | 152 | 1-558 | 572 | Ala-155 to Glu-160, | AR061: 6, AR089: 3 | | |
| | | | | | | Arg-166 to Glu-175. | L0618: 1, L0770: 1, | | |
| | | | | | | | L0803: 1 and S0031: 1. | | |
| | | 947918 | 354 | 1-591 | 774 | Ala-155 to Glu-160. | | | |
| 143 | HS2SH04 | 1165354 | 153 | 1018-1389 | 573 | Gln-39 to Gln-47, | AR050: 18, AR089: 2, | | |
| | | | | | | Thr-89 to Gln-99. | AR051: 2, AR061: 2, | | |
| | | | | | | | AR051: 2, AR061: 2, | | |
| | | | | | | | AR054: 1 | | |
| | | | | | | | H0631: 1 | | |
| | | 947971 | 355 | 2-493 | 775 | Asn-1 to Gly-17, | | | |
| | | | | | | Gln-42 to Asp-51, | | | |
| | | | | | | Gly-100 to Asp-112. | | | |
| 144 | HETGL74 | 1065405 | 154 | 90-434 | 574 | Pro-14 to Gly-19, | AR050: 47, AR051: 46, | | |
| | | | | | | Pro-63 to His-68, | AR054: 39, AR089: 4, | | |
| | | | | | | Arg-74 to Glu-81, | AR061: 2 | | |
| | | | | | | Arg-92 to Tyr-99. | H0046: 4 | | |
| | | 947978 | 356 | 3-581 | 776 | | | | |
| 145 | HLKAB61 | 948002 | 155 | 75-296 | 575 | | AR089: 3, AR061: 1 | | |
| | | | | | | | H0386: 2 and H0610: 1. | | |
| 146 | HCEMK49 | 1169438 | 156 | 112-972 | 576 | | AR089: 3, AR061: 1 | | |
| | | | | | | | S0007: 4, H0052: 1, | | |
| | | | | | | | H0041: 1, N0006: 1 and | | |
| | | | | | | | S0038: 1. | | |
| | | 948028 | 357 | 3-500 | 777 | Leu-39 to Gly-45, | | | |
| | | | | | | His-53 to Ser-59, | | | |
| | | | | | | Gly-63 to Arg-70. | | | |
| 147 | HAJAV28 | 1186149 | 157 | 1635-289 | 577 | Ala-1 to Pro-14. | AR089: 3, AR061: 1 | | |
| | | | | | | | L0747: 12, L0755: 12, | | |
| | | | | | | | L0766: 9, L0438: 9, | | |
| | | | | | | | L0754: 7, H0046: 6, | | |
| | | | | | | | L0751: 6, L0752: 6, | | |
| | | | | | | | H0068: 5, L0775: 5, | | |
| | | | | | | | L0439: 5, S0010: 4, | | |
| | | | | | | | H0547: 4, S0152: 4, | | |
| | | | | | | | L0740: 4, L0779: 4, | | |
| | | | | | | | L0759: 4, H0591: 3, | | |
| | | | | | | | L0771: 3, L0662: 3, | | |
| | | | | | | | L0774: 3, L0666: 3, | | |
| | | | | | | | S0028: 3, L0748: 3, | | |
| | | | | | | | L0759: 3, L0731: 3, | | |
| | | | | | | | L0757: 3, H0624: 2, | | |
| | | | | | | | S0045: 2, H0619: 2, | | |
| | | | | | | | S0222: 2, S0049: 2, | | |
| | | | | | | | H0052: 2, H0615: 2, | | |
| | | | | | | | S0036: 2, T0041: 2, | | |
| | | | | | | | H0509: 2, S0002: 2, | | |
| | | | | | | | S0426: 2, L0769: 2, | | |
| | | | | | | | L0776: 2, L0659: 2, | | |
| | | | | | | | H0521: 2, H0707: 2, | | |
| | | | | | | | L0594: 2, L0362: 2, | | |
| | | | | | | | S0011: 2, H0170: 1, | | |
| | | | | | | | H0171: 1, H0685: 1, | | |
| | | | | | | | S0040: 1, T0049: 1, | | |
| | | | | | | | H0657: 1, S0001: 1, | | |
| | | | | | | | H0638: 1, S0358: 1, | | |
| | | | | | | | S0360: 1, S0408: 1, | | |
| | | | | | | | H0637: 1, S0007: 1, | | |
| | | | | | | | S0132: 1, S6022: 1, | | |
| | | | | | | | H0550: 1, H0431: 1, | | |
| | | | | | | | H0455: 1, H0574: 1, | | |
| | | | | | | | H0486: 1, T0114: 1, | | |
| | | | | | | | H0250: 1, H0069: 1, | | |
| | | | | | | | H0156: 1, L0105: 1, | | |
| | | | | | | | H0597: 1, H0546: 1, | | |
| | | | | | | | H0545: 1, H0050: 1, | | |
| | | | | | | | L0163: 1, H0594: 1, | | |
| | | | | | | | H0266: 1, H0290: 1, | | |
| | | | | | | | S0214: 1, H0328: 1, | | |
| | | | | | | | H0688: 1, H0622: 1, | | |
| | | | | | | | H0032: 1, H0673: 1, | | |
| | | | | | | | H0674: 1, S0364: 1, | | |
| | | | | | | | H0090: 1, H0040: 1, | | |
| | | | | | | | H0551: 1, T0067: 1, | | |
| | | | | | | | H0268: 1, H0100: 1, | | |
| | | | | | | | H0494: 1, H0560: 1, | | |
| | | | | | | | H0561: 1, H0633: 1, | | |
| | | | | | | | L0762: 1, L0763: 1, | | |
| | | | | | | | L0638: 1, L0772: 1, | | |
| | | | | | | | L0773: 1, L0521: 1, | | |
| | | | | | | | L0768: 1, L0794: 1, | | |
| | | | | | | | L0803: 1, L0809: 1, | | |
| | | | | | | | L0545: 1, L0664: 1, | | |
| | | | | | | | L0665: 1, H0144: 1, | | |
| | | | | | | | S0126: 1, H0660: 1, | | |
| | | | | | | | H0672: 1, S0378: 1, | | |
| | | | | | | | S0380: 1, S0350: 1, | | |
| | | | | | | | H0555: 1, H0436: 1, | | |
| | | | | | | | H0540: 1, S0390: 1, | | |
| | | | | | | | S0206: 1, S0032: 1, | | |
| | | | | | | | L0741: 1, L0749: 1, | | |
| | | | | | | | L0786: 1, L0777: 1, | | |
| | | | | | | | L0758: 1, S0026: 1 and | | |
| | | | | | | | H0506: 1. | | |
| | | 948630 | 358 | 3-464 | 778 | Pro-1 to Ala-12. | | | |
| 148 | HETBR74 | 948667 | 158 | 216-479 | 578 | Leu-78 to Cys-88. | AR061: 8, AR089: 6 | | |
| | | | | | | | H0170: 1, S0045: 1, | | |
| | | | | | | | H0619: 1, H0046: 1, | | |
| | | | | | | | L0761: 1, L0754: 1 and | | |
| | | | | | | | S0026: 1. | | |
| 149 | HSDJM56 | 948669 | 159 | 3-755 | 579 | Val-174 to Pro-179, | AR089: 1, AR061: 1 | | |
| | | | | | | Pro-192 to Ile-207. | S0028: 3, S0428: 2, | | |
| | | | | | | | S0282: 1, S0045: 1, | | |
| | | | | | | | S0132: 1, S0222: 1, | | |
| | | | | | | | H0416: 1, S0052: 1, | | |
| | | | | | | | S0152: 1 and S0260: 1. | | |
| 150 | HCWEI19 | 1137795 | 160 | 303-1 | 580 | Pro-62 to Gly-72. | AR089: 4, AR061: 2 | | |
| | | | | | | | H0305: 2 | | |
| | | 948690 | 359 | 178-309 | 779 | | | | |
| 151 | HLDOA63 | 1174795 | 161 | 79-543 | 581 | Leu-2 to Gln-9, | AR089: 17, AR061: 16 | | |
| | | | | | | Pro-11 to Gln-26, | H0510: 2, L0581: 2 | | |
| | | | | | | Lys-65 to Pro-70, | and H0355: 1. | | |
| | | | | | | Ala-128 to Leu-141. | | | |
| | | 949166 | 360 | 69-521 | 780 | Leu-2 to Gln-9, | | | |
| | | | | | | Pro-11 to Gln-26, | | | |
| | | | | | | Lys-65 to Pro-70. | | | |
| 152 | HSSGK13 | 1138016 | 162 | 90-563 | 582 | Thr-64 to Ser-70, | AR061: 2, AR089: 0 | | |
| | | | | | | Glu-92 to Gln-98. | L0805: 4, L0776: 3, | | |
| | | | | | | | L0717: 1, L0021: 1, | | |
| | | | | | | | H0428: 1, H0135: 1, | | |
| | | | | | | | L0638: 1, L0806: 1, | | |
| | | | | | | | L0655: 1, L0745: 1 and | | |
| | | | | | | | L0758: 1. | | |
| | | 949181 | 361 | 90-524 | 781 | Thr-64 to Ser-70, | | | |
| | | | | | | Glu-92 to Gln-98. | | | |
| 153 | HTJND16 | 1137767 | 163 | 2-1594 | 583 | Lys-94 to Ser-99, | AR089: 4, AR061: 1 | | |
| | | | | | | Gly-104 to Asn-111, | H0031: 4, S0430: 1, | | |
| | | | | | | Ala-144 to Ser-150, | H0656: 1, H0586: 1, | | |
| | | | | | | Lys-202 to Ser-207, | H0081: 1, H0616: 1, | | |
| | | | | | | Tyr-249 to Ser-264, | H0264: 1, H0488: 1 and | | |
| | | | | | | Lys-304 to Gly-310, | S0328: 1. | | |
| | | | | | | Ser-345 to Arg-351, | | | |
| | | | | | | Arg-414 to Arg-422, | | | |
| | | | | | | Ile-486 to Thr-491, | | | |
| | | | | | | Pro-518 to Thr-523, | | | |
| | | | | | | Tyr-526 to Glu-531. | | | |
| | | 949188 | 362 | 1-882 | 782 | | | | |
| 154 | HEQAP17 | 949358 | 164 | 819-295 | 584 | | AR051: 744, AR054: | | |
| | | | | | | | 681, AR050: 564, | | |
| | | | | | | | AR061: 2, AR089: 1 | | |
| | | | | | | | S0192: 3, H0544: 1, | | |
| | | | | | | | L0766: 1, L0804: 1, | | |
| | | | | | | | H0521: 1 and L0747: 1. | | |
| 155 | HNTOA59 | 1223513 | 165 | 1-903 | 585 | Ser-126 to Gln-138, | AR050: 8, AR089: 1, | | |
| | | | | | | Ser-166 to Arg-171, | AR061: 1 | | |
| | | | | | | Pro-260 to Lys-271. | L0439: 19, L0747: 6, | | |
| | | | | | | | L0804: 4, L0438: 4, | | |
| | | | | | | | L0766: 3, H0521: 3, | | |
| | | | | | | | S0212: 2, L0794: 2, | | |
| | | | | | | | H0144: 2, L0752: 2, | | |
| | | | | | | | L0594: 2, H0265: 1, | | |
| | | | | | | | H0662: 1, S0354: 1, | | |
| | | | | | | | S0360: 1, H0441: 1, | | |
| | | | | | | | H0438: 1, T0039: 1, | | |
| | | | | | | | H0013: 1, H0156: 1, | | |
| | | | | | | | S0010: 1, L0471: 1, | | |
| | | | | | | | H0083: 1, H0266: 1, | | |
| | | | | | | | H0032: 1, H0038: 1, | | |
| | | | | | | | L0351: 1, H0494: 1, | | |
| | | | | | | | H0646: 1, L0598: 1, | | |
| | | | | | | | H0529: 1, L0763: 1, | | |
| | | | | | | | L0769: 1, L0803: 1, | | |
| | | | | | | | L0775: 1, S0374: 1, | | |
| | | | | | | | L0352: 1, H0520: 1, | | |
| | | | | | | | H0519: 1, S0350: 1, | | |
| | | | | | | | L0756: 1, L0779: 1, | | |
| | | | | | | | L0592: 1, H0665: 1 and | | |
| | | | | | | | S0424: 1. | | |
| | | 950297 | 363 | 3-968 | 783 | Tyr-1 to Glu-10, | | | |
| | | | | | | Ser-130 to Gln-142, | | | |
| | | | | | | Ser-170 to Arg-175, | | | |
| | | | | | | Glu-217 to Ser-222, | | | |
| | | | | | | Pro-264 to Lys-275, | | | |
| | | | | | | Glu-309 to Gly-315. | | | |
| 156 | HE8AZ89 | 1007929 | 166 | 2-667 | 586 | | AR089: 1, AR061: 0 | | |
| | | | | | | | H0624: 1, H0013: 1, | | |
| | | | | | | | L0471: 1, S0250: 1, | | |
| | | | | | | | H0038: 1, H0100: 1, | | |
| | | | | | | | T0042: 1, S0150: 1, | | |
| | | | | | | | L0438: 1 and L0592: 1. | | |
| | | 950713 | 364 | 2-667 | 784 | | | | |
| 157 | HNGEO79 | 1126318 | 167 | 104-544 | 587 | Gln-41 to Asp-48, | AR061: 46, AR089: 19 | | |
| | | | | | | Ser-67 to Leu-72, | AR051: 12, AR054: 10, | | |
| | | | | | | Thr-79 to Ser-84, | AR050: 9 | | |
| | | | | | | Ile-96 to Ser-103, | S0052: 1 and L0758: 1. | | |
| | | | | | | Arg-120 to Ser-127. | | | |
| | | 951489 | 365 | 200-640 | 785 | Gln-41 to Asp-48, | | | |
| | | | | | | Ser-67 to Leu-72, | | | |
| | | | | | | Thr-79 to Ser-84, | | | |
| | | | | | | Ile-96 to Ser-103, | | | |
| | | | | | | Arg-120 to Ser-127. | | | |
| 158 | HDPIX67 | 1182263 | 168 | 2-469 | 588 | Gln-19 to Gly-24, | AR089: 3, AR061: 1 | | |
| | | | | | | Gln-34 to Leu-42, | L0756: 3, H0622: 2, | | |
| | | | | | | Gln-44 to Glu-49, | L0751: 2, H0624: 1, | | |
| | | | | | | Gln-56 to Glu-61, | H0265: 1, S0402: 1, | | |
| | | | | | | Leu-76 to Phe-85, | H0650: 1, S0444: 1, | | |
| | | | | | | Cys-97 to Arg-102. | H0497: 1, H0643: 1, | | |
| | | | | | | | H0632: 1, H0673: 1, | | |
| | | | | | | | H0038: 1, H0646: 1, | | |
| | | | | | | | S0002: 1, L0764: 1, | | |
| | | | | | | | L0766: 1, L0803: 1, | | |
| | | | | | | | L0776: 1, L0790: 1, | | |
| | | | | | | | L0666: 1, H0520: 1, | | |
| | | | | | | | S0152: 1, H0521: 1, | | |
| | | | | | | | H0134: 1, L0743: 1, | | |
| | | | | | | | L0777: 1 and H0543: 1. | | |
| | | 954385 | 366 | 2-334 | 786 | Gln-11 to Glu-16, | | | |
| | | | | | | Leu-31 to Phe-40. | | | |
| 159 | HWLLB11 | 954849 | 169 | 51-524 | 589 | Pro-1 to Glu-10, | AR061: 2, AR089: 2 | | |
| | | | | | | His-60 to Arg-76, | S0358: 2, L0657: 1 and | | |
| | | | | | | Pro-79 to Arg-85, | L0601: 1. | | |
| | | | | | | Ala-95 to Ile-101, | | | |
| | | | | | | Glu-124 to Glu-130, | | | |
| | | | | | | Lys-151 to Arg-158. | | | |
| 160 | HNTEF53 | 954852 | 170 | 33-938 | 590 | Pro-45 to Ser-53, | AR089: 2, AR061: 1 | | |
| | | | | | | Ala-55 to Ala-63, | L0439: 4, L0105: 2, | | |
| | | | | | | Asp-130 to Leu-136. | H0271: 2, L0637: 2, | | |
| | | | | | | | L0653: 2, H0519: 2, | | |
| | | | | | | | S0330: 2, H0431: 1, | | |
| | | | | | | | H0052: 1, L0471: 1, | | |
| | | | | | | | H0375: 1, L0763: 1, | | |
| | | | | | | | L0794: 1, L0803: 1, | | |
| | | | | | | | L0774: 1, L0806: 1, | | |
| | | | | | | | L0526: 1, L0809: 1, | | |
| | | | | | | | L0666: 1, L0664: 1 and | | |
| | | | | | | | H0648: 1. | | |
| 161 | HNTND64 | 954871 | 171 | 1-264 | 591 | Gln-34 to Glu-42. | AR089: 8, AR061: 5 | | |
| | | | | | | | S0040: 1, H0083: 1 and | | |
| | | | | | | | H0520: 1. | | |
| 162 | HFPFA83 | 955614 | 172 | 187-735 | 592 | Thr-9 to Val-16. | AR054: 375, AR051: | | |
| | | | | | | | 284, AR050: 235, | | |
| | | | | | | | AR061: 96, AR089: 33 | | |
| | | | | | | | H0620: 2, H0024: 2, | | |
| | | | | | | | H0208: 1, S0222: 1, | | |
| | | | | | | | H0194: 1, H0123: 1, | | |
| | | | | | | | H0051: 1 and S0052: 1. | | |
| 163 | HFIZB56 | 955618 | 173 | 3-680 | 593 | Thr-23 to Ser-30, | AR089: 31, AR054: 28, | | |
| | | | | | | Arg-58 to Asp-64, | AR050: 26, AR051: 24, | | |
| | | | | | | Ala-75 to Asn-82, | AR061: 3 | | |
| | | | | | | Glu-103 to Gln-112, | S0250: 1, H0030: 1, | | |
| | | | | | | Leu-119 to Cys-126. | H0521: 1, S0192: 1 and | | |
| | | | | | | | S0242: 1. | | |
| 164 | HFPHR82 | 957528 | 174 | 1592-273 | 594 | Ile-256 to Val-269, | AR089: 3, AR061: 1 | 1q21-q25 | 104770, |
| | | | | | | Gln-296 to Gln-301, | L0747: 12, L0755: 12, | | 107300, |
| | | | | | | Ile-316 to Leu-322, | L0766: 9, L0438: 9, | | 107670, |
| | | | | | | Glu-351 to Leu-359, | L0754: 7, H0046: 6, | | 110700, |
| | | | | | | Ser-395 to Arg-406, | L0751: 6, L0752: 6, | | 131210, |
| | | | | | | Gly-425 to Leu-431. | H0068: 5, L0775: 5, | | 135940, |
| | | | | | | | L0439: 5, S0010: 4, | | 136132, |
| | | | | | | | H0547: 4, S0152: 4, | | 145001, |
| | | | | | | | L0740: 4, L0779: 4, | | 146790, |
| | | | | | | | L0759: 4, H0591: 3, | | 150292, |
| | | | | | | | L0771: 3, L0662: 3, | | 152445, |
| | | | | | | | L0774: 3, L0666: 3, | | 152445, |
| | | | | | | | S0028: 3, L0748: 3, | | 159001, |
| | | | | | | | L0756: 3, L0731: 3, | | 173610, |
| | | | | | | | L0757: 3, H0624: 2, | | 174000, |
| | | | | | | | S0045: 2, H0619: 2, | | 179755, |
| | | | | | | | S0222: 2, S0049: 2, | | 182860, |
| | | | | | | | H0052: 2, H0615: 2, | | 182860, |
| | | | | | | | S0036: 2, T0041: 2, | | 182860, |
| | | | | | | | H0509: 2, S0002: 2, | | 191315, |
| | | | | | | | S0426: 2, L0769: 2, | | 208250, |
| | | | | | | | L0776: 2, L0659: 2, | | 230800, |
| | | | | | | | H0521: 2, H0707: 2, | | 230800, |
| | | | | | | | L0594: 2, L0362: 2, | | 233710, |
| | | | | | | | S0011: 2, H0170: 1, | | 266200, |
| | | | | | | | H0171: 1, H0685: 1, | | 600897, |
| | | | | | | | S0040: 1, T0049: 1, | | 600995, |
| | | | | | | | H0657: 1, S0001: 1, | | 601105, |
| | | | | | | | H0638: 1, S0358: 1, | | 601412, |
| | | | | | | | S0360: 1, S0408: 1, | | 601518, |
| | | | | | | | H0637: 1, S0007: 1, | | 601652, |
| | | | | | | | S0132: 1, S6022: 1, | | 602491 |
| | | | | | | | H0550: 1, H0431: 1, | | |
| | | | | | | | H0455: 1, H0574: 1, | | |
| | | | | | | | H0486: 1, T0114: 1, | | |
| | | | | | | | H0250: 1, H0069: 1, | | |
| | | | | | | | H0156: 1, L0105: 1, | | |
| | | | | | | | H0597: 1, H0546: 1, | | |
| | | | | | | | H0545: 1, H0050: 1, | | |
| | | | | | | | L0163: 1, H0594: 1, | | |
| | | | | | | | H0266: 1, H0290: 1, | | |
| | | | | | | | S0214: 1, H0328: 1, | | |
| | | | | | | | H0688: 1, H0622: 1, | | |
| | | | | | | | H0032: 1, H0673: 1, | | |
| | | | | | | | H0674: 1, S0364: 1, | | |
| | | | | | | | H0090: 1, H0040: 1, | | |
| | | | | | | | H0551: 1, T0067: 1, | | |
| | | | | | | | H0268: 1, H0100: 1, | | |
| | | | | | | | H0494: 1, H0560: 1, | | |
| | | | | | | | H0561: 1, H0633: 1, | | |
| | | | | | | | L0762: 1, L0763: 1, | | |
| | | | | | | | L0638: 1, L0772: 1, | | |
| | | | | | | | L0773: 1, L0521: 1, | | |
| | | | | | | | L0768: 1, L0794: 1, | | |
| | | | | | | | L0803: 1, L0809: 1, | | |
| | | | | | | | L0545: 1, L0664: 1, | | |
| | | | | | | | L0665: 1, H0144: 1, | | |
| | | | | | | | S0126: 1, H0660: 1, | | |
| | | | | | | | H0672: 1, S0378: 1, | | |
| | | | | | | | S0380: 1, S0350: 1, | | |
| | | | | | | | H0555: 1, H0436: 1, | | |
| | | | | | | | H0540: 1, S0390: 1, | | |
| | | | | | | | S0206: 1, S0032: 1, | | |
| | | | | | | | L0741: 1, L0749: 1, | | |
| | | | | | | | L0786: 1, L0777: 1, | | |
| | | | | | | | L0758: 1, S0026: 1 and | | |
| | | | | | | | H0506: 1. | | |
| 165 | HBCBT19 | 959953 | 175 | 136-585 | 595 | Asp-40 tp Arg-48, | AR061: 7, AR089: 4 | | |
| | | | | | | Ser-68 to Ile-73, | L0803: 6, L0766: 3, | | |
| | | | | | | Asn-79 to His-84. | L0758: 3, L0790: 2, | | |
| | | | | | | | L0743: 2, L0748: 2, | | |
| | | | | | | | L0747: 2, L0750: 2, | | |
| | | | | | | | L0779: 2, L0755: 2, | | |
| | | | | | | | H0255: 1, H0370: 1, | | |
| | | | | | | | H0530: 1, H0150: 1, | | |
| | | | | | | | S0344: 1, L0763: 1, | | |
| | | | | | | | L0769: 1, L0637: 1, | | |
| | | | | | | | L0764: 1, L0804: 1, | | |
| | | | | | | | L0774: 1, L0805: 1, | | |
| | | | | | | | L0776: 1, L0783: 1, | | |
| | | | | | | | L0809: 1, L0664: 1, | | |
| | | | | | | | L0731: 1, L0681: 1 and | | |
| | | | | | | | H0543: 1. | | |
| 166 | HMCFA91 | 959954 | 176 | 1-729 | 596 | Cys-1 to Ala-10. | AR061: 87, AR089: 61 | | |
| | | | | | | | L0803: 6, L0766: 3, | | |
| | | | | | | | L0758: 3, L0790: 2, | | |
| | | | | | | | L0743: 2, L0748: 2, | | |
| | | | | | | | L0747: 2, L0750: 2, | | |
| | | | | | | | L0779: 2, L0755: 2, | | |
| | | | | | | | H0255: 1, H0370: 1, | | |
| | | | | | | | H0530: 1, H0150: 1, | | |
| | | | | | | | S0344: 1, L0763: 1, | | |
| | | | | | | | L0769: 1, L0637: 1, | | |
| | | | | | | | L0764: 1, L0804: 1, | | |
| | | | | | | | L0774: 1, L0805: 1, | | |
| | | | | | | | L0776: 1, L0783: 1, | | |
| | | | | | | | L0809: 1, L0664: 1, | | |
| | | | | | | | L0665: 1, L0752: 1, | | |
| | | | | | | | L0731: 1, L0681: 1 and | | |
| | | | | | | | H0543: 1. | | |
| 167 | HTEIB14 | 1128044 | 177 | 1-309 | 597 | Ser-3 to Ser-11, | AR061: 7, AR089: 4 | | |
| | | | | | | Arg-19 to Thr-28, | H0038: 4, H0616: 3, | | |
| | | | | | | Arg-37 to Gln-66. | L0747: 3, L0663: 2, | | |
| | | | | | | | L0758: 2, H0369: 1, | | |
| | | | | | | | H0428: 1, L0769: 1, | | |
| | | | | | | | L0542: 1, L0809: 1, | | |
| | | | | | | | L0666: 1, L0665: 1, | | |
| | | | | | | | L0743: 1, L0777: 1, | | |
| | | | | | | | L0731: 1 and S0456: 1. | | |
| | | 963099 | 367 | 3-308 | 787 | Gln-1 to Ser-10, | | | |
| | | | | | | Arg-18 to Thr-27, | | | |
| | | | | | | Arg-36 to Gln-65. | | | |
| 168 | HEAAA42 | 1128009 | 178 | 3-428 | 598 | Thr-20 to Lys-36, | AR061: 8, AR089: 5 | | |
| | | | | | | Arg-58 to Thr-67, | H0038: 4, H0616: 3, | | |
| | | | | | | Arg-76 to Gln-105. | L0747: 3, L0663: 2, | | |
| | | | | | | | L0758: 2, H0369: 1, | | |
| | | | | | | | H0428: 1, L0769: 1, | | |
| | | | | | | | L0542: 1, L0809: 1, | | |
| | | | | | | | L0666: 1, L0665: 1, | | |
| | | | | | | | L0743: 1, L0777: 1, | | |
| | | | | | | | L0731: 1 and S0456: 1. | | |
| | | 963100 | 368 | 3-272 | 788 | | | | |
| 169 | HTTFZ40 | 1219172 | 179 | 345-37 | 599 | | AR061: 5, AR089: 3 | | |
| | | | | | | | H0616: 2, H0341: 1, | | |
| | | | | | | | H0644: 1, H0135: 1, | | |
| | | | | | | | H0038: 1, H0040: 1, | | |
| | | | | | | | L0745: 1 and L0731: 1. | | |
| | | 964697 | 369 | 350-781 | 789 | Asn-1 to Ser-10. | | | |
| 170 | HSODC08 | 1189493 | 180 | 113-1225 | 600 | Gln-36 to Asp-41, | AR089: 5, AR061: 1 | | |
| | | | | | | Ser-73 to Glu-82, | H0038: 5, L0748: 5, | | |
| | | | | | | Phe-85 to Arg-98, | L0777: 5, L0766: 4, | | |
| | | | | | | Leu-170 to Glu-176, | L0769: 3, L0756: 3, | | |
| | | | | | | Lys-226 to Asp-239, | L0759: 3, S6028: 2, | | |
| | | | | | | Gly-285 to Leu-297, | H0271: 2, L0776: 2, | | |
| | | | | | | Asp-327 to Glu-339, | H0435: 2, L0754: 2, | | |
| | | | | | | Glu-343 to Leu-348. | L0747: 2, L0779: 2, | | |
| | | | | | | | L0752: 2, L0758: 2, | | |
| | | | | | | | H0595: 2, L0596: 2, | | |
| | | | | | | | H0393: 1, H0431: 1, | | |
| | | | | | | | H0486: 1, H0427: 1, | | |
| | | | | | | | H0004: 1, H0318: 1, | | |
| | | | | | | | H0085: 1, H0546: 1, | | |
| | | | | | | | L0471: 1, S0022: 1, | | |
| | | | | | | | H0252: 1, H0644: 1, | | |
| | | | | | | | H0673: 1, H0674: 1, | | |
| | | | | | | | H0124: 1, H0616: 1, | | |
| | | | | | | | S0142: 1, S0422: 1, | | |
| | | | | | | | L0770: 1, L0761: 1, | | |
| | | | | | | | L0771: 1, L0775: 1, | | |
| | | | | | | | L0653: 1, L0634: 1, | | |
| | | | | | | | L0659: 1, L0544: 1, | | |
| | | | | | | | L0664: 1, H0144: 1, | | |
| | | | | | | | S0126: 1, H0670: 1, | | |
| | | | | | | | H0555: 1, H0436: 1, | | |
| | | | | | | | H0627: 1, S0028: 1, | | |
| | | | | | | | L0780: 1, L0731: 1, | | |
| | | | | | | | L0757: 1, L0361: 1, | | |
| | | | | | | | S0026: 1, S0412: 1 and | | |
| | | | | | | | L0697: 1. | | |
| | | 966264 | 370 | 1334-222 | 790 | Gln-36 to Asp-41, | | | |
| | | | | | | Ser-73 to Glu-82, | | | |
| | | | | | | Phe-85 to Arg-98, | | | |
| | | | | | | Leu-170 to Glu-176, | | | |
| | | | | | | Lys-226 to Asp-239, | | | |
| | | | | | | Gly-285 to Leu-297, | | | |
| | | | | | | Asp-327 to Glu-339, | | | |
| | | | | | | Glu-343 to Leu-348. | | | |
| 171 | HAHHE43 | 1182255 | 181 | 3-383 | 601 | | AR089: 20, AR061: 8 | | |
| | | | | | | | H0599: 2, L0759: 2, | | |
| | | | | | | | H0556: 1, H0638: 1, | | |
| | | | | | | | S0418: 1, S6022: 1, | | |
| | | | | | | | L0021: 1, S0010: 1, | | |
| | | | | | | | H0266: 1, H0553: 1, | | |
| | | | | | | | H0644: 1, L0763: 1, | | |
| | | | | | | | L0641: 1, L0766: 1, | | |
| | | | | | | | L0805: 1, L0655: 1, | | |
| | | | | | | | H0539: 1, S0028: 1 and | | |
| | | | | | | | L0777: 1. | | |
| | | 966830 | 371 | 2-376 | 791 | | | | |
| 172 | HWMES65 | 1126347 | 182 | 2-688 | 602 | Asp-30 to Trp-35, | AR089: 17, AR061: 11 | | |
| | | | | | | Ser-38 to Arg-43, | S0358: 2 and H0539: 1. | | |
| | | | | | | Phe-114 to Ser-138, | | | |
| | | | | | | Ser-168 to Trp-177. | | | |
| | | 969190 | 372 | 2-382 | 792 | Asp-30 to Trp-35, | | | |
| | | | | | | Ser-38 to Arg-43. | | | |
| 173 | HE8NI24 | 971296 | 183 | 318-749 | 603 | | AR050: 3, AR051: 1, | | |
| | | | | | | | AR089: 0, AR061: 0 | | |
| | | | | | | | H0013: 3, L0794: 2, | | |
| | | | | | | | L0439: 2, L0756: 2, | | |
| | | | | | | | L0779: 2, L0758: 2, | | |
| | | | | | | | S0001: 1, H0619: 1, | | |
| | | | | | | | L0638: 1, L0641: 1, | | |
| | | | | | | | L0776: 1 and H0435: 1. | | |
| 174 | HHATR09 | 1126363 | 184 | 64-939 | 604 | Asn-27 to Ser-36, | AR050: 98, AR054: 70, | | |
| | | | | | | Arg-52 to Asn-60, | AR051: 62, AR089: 18, | | |
| | | | | | | Met-68 to Gln-73, | AR061: 8 | | |
| | | | | | | Pro-163 to Asp-168, | S0418: 1 | | |
| | | | | | | Ile-181 to Glu-189, | | | |
| | | | | | | Ala-205 to Gln-212, | | | |
| | | | | | | Arg-257 to Asn-266, | | | |
| | | | | | | Pro-272 to Lys-292. | | | |
| | | 971330 | 373 | 138-1082 | 793 | Asn-27 to Ser-36, | | | |
| | | | | | | Arg-52 to Asn-60, | | | |
| | | | | | | Met-68 to Gln-73. | | | |
| 175 | HNTAR65 | 1226663 | 185 | 34-2280 | 605 | His-1 to Gly-12. | AR061: 757, AR050: | | |
| | | | | | | | 347, AR051: 304, | | |
| | | | | | | | AR054: 264, AR089: | | |
| | | | | | | | 248 | | |
| | | | | | | | L0744: 8, L0777: 8, | | |
| | | | | | | | L0749: 6, S0126: 4, | | |
| | | | | | | | S0358: 3, H0622: 3, | | |
| | | | | | | | L0805: 3, H0519: 3, | | |
| | | | | | | | H0624: 2, L0717: 2, | | |
| | | | | | | | H0486: 2, H0012: 2, | | |
| | | | | | | | S0250: 2, L0662: 2, | | |
| | | | | | | | L0659: 2, L0519: 2, | | |
| | | | | | | | L0663: 2, L0438: 2, | | |
| | | | | | | | H0520: 2, H0435: 2, | | |
| | | | | | | | L0751: 2, L0747: 2, | | |
| | | | | | | | L0759: 2, H0685: 1, | | |
| | | | | | | | S0212: 1, H0550: 1, | | |
| | | | | | | | H0013: 1, S0280: 1, | | |
| | | | | | | | H0599: 1, H0575: 1, | | |
| | | | | | | | H0123: 1, L0471: 1, | | |
| | | | | | | | H0057: 1, H0266: 1, | | |
| | | | | | | | H0687: 1, H0292: 1, | | |
| | | | | | | | H0688: 1, H0030: 1, | | |
| | | | | | | | H0644: 1, T0041: 1, | | |
| | | | | | | | L0770: 1, L0771: 1, | | |
| | | | | | | | L0768: 1, L0803: 1, | | |
| | | | | | | | L0774: 1, L0655: 1, | | |
| | | | | | | | L0665: 1, H0547: 1, | | |
| | | | | | | | S0330: 1, H0539: 1, | | |
| | | | | | | | H0518: 1, S0152: 1, | | |
| | | | | | | | H0555: 1, S0390: 1, | | |
| | | | | | | | L0748: 1, L0439: 1, | | |
| | | | | | | | L0740: 1, L0779: 1, | | |
| | | | | | | | L0755: 1, L0731: 1, | | |
| | | | | | | | H0595: 1, L0591: 1, | | |
| | | | | | | | L0593: 1, S0192: 1 and | | |
| | | | | | | | S0196: 1. | | |
| | | 971373 | 374 | 34-1683 | 794 | His-1 to Gly-12. | | | |
| 176 | HYABP53 | 1109820 | 186 | 26-991 | 606 | His-1 to Gly-12, | AR054: 47, AR051: 42, | | |
| | | | | | | His-33 to Gly-44, | AR050: 39, AR089: 1, | | |
| | | | | | | Thr-124 to Gly-137, | AR061: 1 | | |
| | | | | | | Thr-153 to Thr-158, | H0583: 1 and H0656: 1. | | |
| | | | | | | Thr-199 to Pro-215. | | | |
| | | 971448 | 375 | 26-637 | 795 | His-1 to Gly-12, | | | |
| | | | | | | His-33 to Gly-44, | | | |
| | | | | | | Thr-124 to Gly-137, | | | |
| | | | | | | Thr-153 to Thr-158, | | | |
| | | | | | | Arg-188 to Gly-193. | | | |
| 177 | HSXBV89 | 1027021 | 187 | 1-2037 | 607 | Gln-25 to Gly-33, | AR054: 23, AR061: 4, | | |
| | | | | | | Pro-49 to Gly-55, | AR089: 3, AR050: 0 | | |
| | | | | | | Gly-89 to Glu-97, | L0439: 31, L0741: 9, | | |
| | | | | | | Ser-176 to Glu-183, | L0438: 7, L0777: 6, | | |
| | | | | | | Thr-231 to Gly-240, | H0052: 5, H0617: 5, | | |
| | | | | | | Pro-267 to Thr-275, | L0748: 4, L0753: 4, | | |
| | | | | | | Pro-297 to Asp-308, | L0769: 3, L0775: 3, | | |
| | | | | | | Asp-340 to Ser-345, | L0776: 3, S0378: 3, | | |
| | | | | | | Arg-353 to Leu-361, | L0779: 3, S0040: 2, | | |
| | | | | | | Pro-375 to Gly-382, | L0103: 2, H0046: 2, | | |
| | | | | | | Glu-393 to Trp-410, | H0284: 2, T0006: 2, | | |
| | | | | | | Gly-470 to Ser-475, | S0036: 2, S0038: 2, | | |
| | | | | | | Tyr-504 to Arg-516, | L0351: 2, S0370: 2, | | |
| | | | | | | Gly-531 to Thr-539, | L0764: 2, H0670: 2, | | |
| | | | | | | Pro-571 to Gln-580, | L0602: 2, L0747: 2, | | |
| | | | | | | Leu-591 to Glu-598, | L0592: 2, S0342: 1, | | |
| | | | | | | Gln-601 to Gly-611, | S0282: 1, S0030: 1, | | |
| | | | | | | Gly-649 to Ser-654, | H0484: 1, S0007: 1, | | |
| | | | | | | Asp-661 to Leu-666, | S0278: 1, H0261: 1, | | |
| | | | | | | Ala-669 to Glu-674. | S0222: 1, H0441: 1, | | |
| | | | | | | | H0156: 1, T0082: 1, | | |
| | | | | | | | S6028: 1, H0271: 1, | | |
| | | | | | | | L0483: 1, H0424: 1, | | |
| | | | | | | | H0213: 1, H0181: 1, | | |
| | | | | | | | S0112: 1, S0144: 1, | | |
| | | | | | | | S0002: 1, L0520: 1, | | |
| | | | | | | | L0762: 1, L0763: 1, | | |
| | | | | | | | L0638: 1, L0772: 1, | | |
| | | | | | | | L0768: 1, L0653: 1, | | |
| | | | | | | | L0659: 1, L0636: 1, | | |
| | | | | | | | L0367: 1, L0791: 1, | | |
| | | | | | | | L0665: 1, L0352: 1, | | |
| | | | | | | | H0672: 1, H0539: 1, | | |
| | | | | | | | S0032: 1, L0742: 1, | | |
| | | | | | | | L0740: 1, L0758: 1 and | | |
| | | | | | | | H0667: 1. | | |
| | | 971821 | 376 | 3-509 | 796 | Gln-20 to Gly-28, | | | |
| | | | | | | Pro-44 to Gly-50. | | | |
| 178 | HPTZB93 | 971842 | 188 | 850-164 | 608 | | AR089: 61, AR061: 22, | | |
| | | | | | | | AR051: 14, AR050: 2, | | |
| | | | | | | | AR054: 0 | | |
| | | | | | | | L0776: 5, L0789: 5, | | |
| | | | | | | | L0769: 3, L0805: 3, | | |
| | | | | | | | H0231: 1, H0213: 1, | | |
| | | | | | | | H0418: 1, L0794: 1, | | |
| | | | | | | | L0750: 1 and L0731: 1. | | |
| 179 | HRSHM38 | 1130648 | 189 | 542-1267 | 609 | Phe-28 to Leu-34. | AR051: 26, AR054: 20, | | |
| | | | | | | | AR050: 18, AR089: 6, | | |
| | | | | | | | AR061: 2 | | |
| | | | | | | | H0087: 1 and H0264: 1. | | |
| | | 972248 | 377 | 2-604 | 797 | Asn-6 to Ser-15, | | | |
| | | | | | | Pro-29 to Arg-42, | | | |
| | | | | | | Pro-91 to Gln-108, | | | |
| | | | | | | Lys-123 to Arg-133, | | | |
| | | | | | | Ile-157 to Phe-168, | | | |
| | | | | | | Gln-171 to Val-178, | | | |
| | | | | | | Gly-185 to Pro-197. | | | |
| 180 | HLDQK77 | 1169219 | 190 | 2-1282 | 610 | Arg-1 to Cys-10, | AR089: 1, AR061: 1 | | |
| | | | | | | Cys-34 to Gln-45, | L0758: 12, L0662: 11, | | |
| | | | | | | Glu-63 to Phe-75, | H0251: 9, L0731: 9, | | |
| | | | | | | Glu-82 to Ser-90, | S0360: 5, H0013: 5, | | |
| | | | | | | Lys-119 to Gly-125, | L0659: 5, L0747: 4, | | |
| | | | | | | Val-127 to Gly-138, | H0252: 4, H0328: 4, | | |
| | | | | | | Glu-160 to Arg-173, | L0666: 4, L0439: 4, | | |
| | | | | | | Glu-180 to Ser-193, | H0135: 3, L0764: 3, | | |
| | | | | | | Cys-197 to Ser-203, | L0783: 3, L0749: 3, | | |
| | | | | | | Glu-206 to Asp-214, | S0358: 2, L0776: 2, | | |
| | | | | | | Thr-253 to Ala-266, | L0663: 2, H0651: 2, | | |
| | | | | | | Ala-271 to Gln-283, | L0744: 2, L0754: 2, | | |
| | | | | | | Ser-310 to His-326, | H0675: 1, H0329: 1, | | |
| | | | | | | Leu-340 to Gly-349, | H0619: 1, L0717: 1, | | |
| | | | | | | Lys-351 to Phe-356, | H0369: 1, H0550: 1, | | |
| | | | | | | Leu-360 to Cys-369, | H0333: 1, H0632: 1, | | |
| | | | | | | Asp-378 to Ser-384, | H0486: 1, T0060: 1, | | |
| | | | | | | Glu-399 to Gly-427. | H0042: 1, H0575: 1, | | |
| | | | | | | | H0618: 1, H0150: 1, | | |
| | | | | | | | H0123: 1, H0050: 1, | | |
| | | | | | | | H0105: 1, T0003: 1, | | |
| | | | | | | | H0024: 1, H0510: 1, | | |
| | | | | | | | H0594: 1, H0028: 1, | | |
| | | | | | | | H0644: 1, S0364: 1, | | |
| | | | | | | | S0366: 1, H0591: 1, | | |
| | | | | | | | H0100: 1, L0763: 1, | | |
| | | | | | | | L0631: 1, L0637: 1, | | |
| | | | | | | | L0646: 1, L0641: 1, | | |
| | | | | | | | L0644: 1, L0649: 1, | | |
| | | | | | | | L0803: 1, L0775: 1, | | |
| | | | | | | | L0782: 1, L0809: 1, | | |
| | | | | | | | L0519: 1, L0793: 1, | | |
| | | | | | | | L0665: 1, H0144: 1, | | |
| | | | | | | | L0438: 1, H0684: 1, | | |
| | | | | | | | H0672: 1, S0380: 1, | | |
| | | | | | | | L0748: 1, L0759: 1, | | |
| | | | | | | | L0596: 1, L0366: 1, | | |
| | | | | | | | L0600: 1 and H0352: 1. | | |
| | | 973464 | 378 | 3-1229 | 798 | Cys-27 to Gln-38, | | | |
| | | | | | | Glu-56 to Glu-67. | | | |
| 181 | HSCKD11 | 973894 | 191 | 117-326 | 611 | Ala-6 to Ala-11, | AR089: 1, AR061: 1 | | |
| | | | | | | Phe-19 to Asn-24, | H0667: 1 | | |
| | | | | | | Val-29 to Lys-34. | | | |
| 182 | HDPLT62 | 973945 | 192 | 405-809 | 612 | | AR089: 1, AR061: 0 | | |
| | | | | | | | H0521: 1 | | |
| 183 | HNTCU89 | 1137760 | 193 | 3-614 | 613 | Ile-29 to Gly-34, | AR089: 3, AR061: 1 | | |
| | | | | | | Arg-164 to Thr-171. | L0754: 10, L0766: 9, | | |
| | | | | | | | L0591: 7, L0748: 6, | | |
| | | | | | | | H0170: 4, S0360: 4, | | |
| | | | | | | | L0752: 4, H0556: 3, | | |
| | | | | | | | H0031: 3, L0646: 3, | | |
| | | | | | | | L0527: 3, L0596: 3, | | |
| | | | | | | | H0423: 3, H0265: 2, | | |
| | | | | | | | S0114: 2, S0410: 2, | | |
| | | | | | | | H0013: 2, H0266: 2, | | |
| | | | | | | | H0615: 2, H0056: 2, | | |
| | | | | | | | L0803: 2, L0776: 2, | | |
| | | | | | | | L0782: 2, H0134: 2, | | |
| | | | | | | | H0436: 2, L0756: 2, | | |
| | | | | | | | L0362: 2, H0543: 2, | | |
| | | | | | | | H0624: 1, L0002: 1, | | |
| | | | | | | | H0650: 1, S0418: 1, | | |
| | | | | | | | H0208: 1, S0045: 1, | | |
| | | | | | | | S0046: 1, H0619: 1, | | |
| | | | | | | | T0048: 1, H0318: 1, | | |
| | | | | | | | L0109: 1, H0046: 1, | | |
| | | | | | | | H0050: 1, L0471: 1, | | |
| | | | | | | | S0051: 1, H0083: 1, | | |
| | | | | | | | H0328: 1, H0604: 1, | | |
| | | | | | | | H0068: 1, H0038: 1, | | |
| | | | | | | | H0551: 1, H0560: 1, | | |
| | | | | | | | H0561: 1, H0132: 1, | | |
| | | | | | | | L0763: 1, L0667: 1, | | |
| | | | | | | | L0662: 1, L0388: 1, | | |
| | | | | | | | L0804: 1, L0805: 1, | | |
| | | | | | | | L0606: 1, L0657: 1, | | |
| | | | | | | | L0659: 1, L0542: 1, | | |
| | | | | | | | L0518: 1, L0809: 1, | | |
| | | | | | | | L0791: 1, L0792: 1, | | |
| | | | | | | | H0547: 1, H0519: 1, | | |
| | | | | | | | H0682: 1, H0648: 1, | | |
| | | | | | | | S0330: 1, H0696: 1, | | |
| | | | | | | | L0750: 1, L0779: 1, | | |
| | | | | | | | L0731: 1, L0757: 1, | | |
| | | | | | | | L0759: 1, H0445: 1, | | |
| | | | | | | | L0480: 1, H0542: 1 and | | |
| | | | | | | | H0506: 1. | | |
| | | 975097 | 379 | 1731-1183 | 799 | Ile-26 to Gly-31, | | | |
| | | | | | | Arg-161 to Thr-168. | | | |
| 184 | HELDY60 | 945815 | 194 | 3-179 | 614 | | AR061: 10, AR054: 8, | | |
| | | | | | | | AR061: 3, AR089: 2 | | |
| | | | | | | | H0170: 2, H0031: 2, | | |
| | | | | | | | L0748: 2, H0624: 1, | | |
| | | | | | | | S0360: 1, S0045: 1, | | |
| | | | | | | | H0013: 1, H0046: 1, | | |
| | | | | | | | H0068: 1, H0038: 1, | | |
| | | | | | | | L0662: 1, L0805: 1, | | |
| | | | | | | | L0776: 1, H0519: 1, | | |
| | | | | | | | H0696: 1 and L0731: 1. | | |
| | | 975104 | 308 | 73-2472 | 800 | Pro-19 to Arg-34, | | | |
| | | | | | | Arg-36 to Phe-45, | | | |
| | | | | | | Tyr-49 to Thr-55, | | | |
| | | | | | | Val-59 to Ile-67, | | | |
| | | | | | | Gly-86 to Ser-96, | | | |
| | | | | | | Pro-98 to Asn-127, | | | |
| | | | | | | Ser-129 to Trp-134, | | | |
| | | | | | | Thr-136 to Gly-165, | | | |
| | | | | | | Pro-167 to Met-178, | | | |
| | | | | | | Asn-182 to Trp-188. | | | |
| 185 | HGBGO22 | 1128013 | 195 | 2-982 | 615 | Ala-1 to Phe-25, | AR061: 7, AR089: 6 | | |
| | | | | | | Val-27 to Leu-34, | H0014: 2, L0790: 2, | | |
| | | | | | | Arg-55 to Ala-69, | H0393: 1, H0036: 1, | | |
| | | | | | | Ser-146 to Asn-158, | H0622: 1, L0662: 1, | | |
| | | | | | | Asn-170 to Asp-178, | L0768: 1, L0783: 1, | | |
| | | | | | | Gln-184 to Leu-189, | L0809: 1, S0374: 1 and | | |
| | | | | | | Ala-192 to Thr-199, | L0779: 1. | | |
| | | | | | | Gln-236 to Gln-244, | | | |
| | | | | | | Lys-297 to Leu-306, | | | |
| | | | | | | Arg-311 to Phe-318. | | | |
| | | 558830 | 381 | 69-359 | 801 | Cys-1 to Cys-12, | | | |
| | | | | | | Thr-30 to Ser-55, | | | |
| | | | | | | Gly-59 to Val-66, | | | |
| | | | | | | Gly-70 to Val-75. | | | |
| 186 | HFXDP53 | 578868 | 196 | 3-272 | 616 | Lys-1 to Arg-7, | AR061: 3, AR089: 1 | | |
| | | | | | | Phe-10 to Arg-19. | S0001: 1 | | |
| 187 | HMTAV95 | 614936 | 197 | 3-281 | 617 | Asp-1 to Ile-6, | AR089: 0, AR061: 0 | | |
| | | | | | | Trp-13 to Glu-21, | H0518: 2 | | |
| | | | | | | Met-27 to Lys-34, | | | |
| | | | | | | Ala-50 to Thr-56. | | | |
| 188 | HDPGS68 | 1182262 | 198 | 2480-2109 | 618 | | AR061: 1, AR089: 1 | | |
| | | | | | | | H0271: 18, L0659: 18, | | |
| | | | | | | | S0152: 15, H0521: 13, | | |
| | | | | | | | L0666: 7, S0132: 6, | | |
| | | | | | | | L0754: 5, L0601: 5, | | |
| | | | | | | | S0360: 4, H0494: 4, | | |
| | | | | | | | L0771: 4, L0653: 4, | | |
| | | | | | | | L0751: 4, H0295: 3, | | |
| | | | | | | | H0486: 3, H0635: 3, | | |
| | | | | | | | H0416: 3, H0615: 3, | | |
| | | | | | | | L0662: 3, S0428: 3, | | |
| | | | | | | | L0748: 3, L0747: 3, | | |
| | | | | | | | L0731: 3, H0661: 2, | | |
| | | | | | | | S0376: 2, H0437: 2, | | |
| | | | | | | | H0587: 2, H0485: 2, | | |
| | | | | | | | T0039: 2, H0318: 2, | | |
| | | | | | | | H0620: 2, H0266: 2, | | |
| | | | | | | | H0090: 2, H0623: 2, | | |
| | | | | | | | L0763: 2, L0646: 2, | | |
| | | | | | | | L0642: 2, L0774: 2, | | |
| | | | | | | | L0775: 2, L0378: 2, | | |
| | | | | | | | L0806: 2, L0664: 2, | | |
| | | | | | | | S0374: 2, H0519: 2, | | |
| | | | | | | | L0439: 2, L0779: 2, | | |
| | | | | | | | L0755: 2, L0604: 2, | | |
| | | | | | | | L0698: 2, H0149: 1, | | |
| | | | | | | | H0686: 1, S0212: 1, | | |
| | | | | | | | H0255: 1, H0637: 1, | | |
| | | | | | | | S0046: 1, H0411: 1, | | |
| | | | | | | | S0278: 1, H0599: 1, | | |
| | | | | | | | H0251: 1, H0545: 1, | | |
| | | | | | | | H0457: 1, H0024: 1, | | |
| | | | | | | | H0014: 1, H0328: 1, | | |
| | | | | | | | H0553: 1, H0644: 1, | | |
| | | | | | | | H0598: 1, H0634: 1, | | |
| | | | | | | | H0268: 1, H0056: 1, | | |
| | | | | | | | L0564: 1, S0344: 1, | | |
| | | | | | | | S0002: 1, S0426: 1, | | |
| | | | | | | | L0770: 1, L0372: 1, | | |
| | | | | | | | L0641: 1, L0645: 1, | | |
| | | | | | | | L0648: 1, L0767: 1, | | |
| | | | | | | | L0649: 1, L0389: 1, | | |
| | | | | | | | L0388: 1, L0803: 1, | | |
| | | | | | | | L0645: 1, L0665: 1, | | |
| | | | | | | | S0052: 1, S0053: 1, | | |
| | | | | | | | S0216: 1, H0658: 1, | | |
| | | | | | | | H0672: 1, H0518: 1, | | |
| | | | | | | | H0522: 1, H0696: 1, | | |
| | | | | | | | S0406: 1, L0750: 1, | | |
| | | | | | | | L0752: 1, H0445: 1, | | |
| | | | | | | | L0596: 1, S0458: 1 and | | |
| | | | | | | | H0506: 1. | | |
| | | 752975 | 382 | 118-282 | 802 | | | | |
| 189 | HCGME42 | 1203723 | 199 | 3-710 | 619 | Pro-70 tp Asp-76, | AR089: 6, AR061: 3 | | |
| | | | | | | Val-115 to Gly-121. | H0457: 23, H0521: 6, | | |
| | | | | | | | H0637: 5, H0580: 4, | | |
| | | | | | | | L0731: 4, H0402: 3, | | |
| | | | | | | | H0581: 3, L0776: 3, | | |
| | | | | | | | S0052: 3, H0423: 3, | | |
| | | | | | | | L0662: 2, L0748: 2, | | |
| | | | | | | | H0543: 2, H0265: 1, | | |
| | | | | | | | H0664: 1, H0306: 1, | | |
| | | | | | | | H0459: 1, S0358: 1, | | |
| | | | | | | | H0393: 1, H0587: 1, | | |
| | | | | | | | L0021: 1, H0575: 1, | | |
| | | | | | | | H0439: 1, H0050: 1, | | |
| | | | | | | | L0163: 1, L0648: 1, | | |
| | | | | | | | L0775: 1, L0658: 1, | | |
| | | | | | | | L0659: 1, H0701: 1, | | |
| | | | | | | | S0380: 1, H0576: 1, | | |
| | | | | | | | L0750: 1 and L0599: 1. | | |
| | | 768283 | 383 | 3-470 | 803 | Pro-70 to Asp-76, | | | |
| | | | | | | Val-115 to Gly-121, | | | |
| | | | | | | Pro-146 to Gly-151. | | | |
| 190 | HLWAV41 | 1159074 | 200 | 744-1 | 620 | Ala-4 to Gly-10, | AR089: 10, AR061: 5 | | |
| | | | | | | Ala-13 to Asp-18, | H0553: 2, H0619: 1, | | |
| | | | | | | Pro-20 to Pro-29, | H0030: 1, L0763: 1 and | | |
| | | | | | | Gly-39 to Pro-51, | L0592: 1. | | |
| | | | | | | Ile-115 to Ser-122, | | | |
| | | | | | | Gly-234 to Gln-239. | | | |
| | | 786224 | 384 | 1-420 | 804 | Pro-43 to Thr-50. | | | |
| 191 | HLDBL95 | 1220690 | 201 | 2-1138 | 621 | Ser-43 to Cys-50, | AR050: 24, AR089: 6, | | |
| | | | | | | Arg-57 to Trp-63, | AR061: 2, AR051: 0 | | |
| | | | | | | Asn-78 to Arg-84, | L0794: 3, L0758: 3, | | |
| | | | | | | Ile-91 to Thr-112, | H0135: 2, H0509: 2, | | |
| | | | | | | Cys-125 to Asn-130, | L0764: 2, L0803: 2, | | |
| | | | | | | Ala-163 to Tyr-171, | L0517: 2, L0809: 2, | | |
| | | | | | | Glu-244 to Tyr-253, | L0438: 2, L0748: 2, | | |
| | | | | | | Cys-275 to Glu-285, | L0749: 2, S0418: 1, | | |
| | | | | | | Pro-306 to Pro-315, | S0356: 1, S0358: 1, | | |
| | | | | | | Ser-327 to Asn-335. | S0010: 1, H0024: 1, | | |
| | | | | | | | H0051: 1, H0428: 1, | | |
| | | | | | | | T0006: 1, L0372: 1, | | |
| | | | | | | | L0774: 1, L0775: 1, | | |
| | | | | | | | L0787: 1, H0547: 1, | | |
| | | | | | | | S0152: 1, L0605: 1 and | | |
| | | | | | | | L0592: 1. | | |
| | | 811269 | 385 | 157-444 | 805 | | | | |
| 192 | HHFGP83 | 828162 | 202 | 2-304 | 622 | Gly-1 to Pro-22, | AR089: 12, AR061: 9 | | |
| | | | | | | Glu-24 to Thr-30. | L0731: 9, L0665: 6, | | |
| | | | | | | | H0024: 4, L0745: 4, | | |
| | | | | | | | L0747: 4, L0662: 3, | | |
| | | | | | | | L0794: 3, H0550: 2, | | |
| | | | | | | | H0081: 2, H0012: 2, | | |
| | | | | | | | S0022: 2, H0100: 2, | | |
| | | | | | | | L0769: 2, L0764: 2, | | |
| | | | | | | | L0659: 2, H0520: 2, | | |
| | | | | | | | L0777: 2, L0759: 2, | | |
| | | | | | | | H0685: 1, S0040: 1, | | |
| | | | | | | | S0354: 1, H0351: 1, | | |
| | | | | | | | H0392: 1, H0586: 1, | | |
| | | | | | | | L0021: 1, H0253: 1, | | |
| | | | | | | | L0157: 1, H0123: 1, | | |
| | | | | | | | H0050: 1, L0471: 1, | | |
| | | | | | | | H0328: 1, H0615: 1, | | |
| | | | | | | | H0063: 1, L0598: 1, | | |
| | | | | | | | L0770: 1, L0638: 1, | | |
| | | | | | | | L0521: 1, L0768: 1, | | |
| | | | | | | | L0776: 1, L0629: 1, | | |
| | | | | | | | L0657: 1, L0783: 1, | | |
| | | | | | | | L0809: 1, L0666: 1, | | |
| | | | | | | | L0663: 1, S0148: 1, | | |
| | | | | | | | H0670: 1, H0134: 1 and | | |
| | | | | | | | L0779: 1. | | |
| 193 | HEGAR66 | 1199137 | 203 | 1-582 | 623 | Pro-65 to Gln-72, | AR061: 25, AR089: 13 | | |
| | | | | | | Ser-103 to Gly-108. | H0550: 1 and H0081: 1. | | |
| | | 844291 | 386 | 1-582 | 806 | Pro-65 to Gln-72, | | | |
| | | | | | | Ser-103 to Gly-108. | | | |
| 194 | HAPPY24 | 1137789 | 204 | 237-1019 | 624 | Gln-1 to Thr-7, | AR061: 5, AR089: 3 | | |
| | | | | | | Gln-132 to Arg-140, | L0655: 2, L0603: 2, | | |
| | | | | | | Ser-172 to Ala-178, | L0785: 1, H0663: 1, | | |
| | | | | | | Ser-207 to Arg-214, | H0586: 1, H0575: 1, | | |
| | | | | | | Ser-222 to Glu-228, | H0581: 1, H0457: 1, | | |
| | | | | | | His-237 to Ser-245, | H0014: 1, H0606: 1, | | |
| | | | | | | Glu-248 to Ser-255. | S0144: 1, L0790: 1, | | |
| | | | | | | | H0521: 1, L0749: 1 and | | |
| | | | | | | | H0445: 1. | | |
| | | 844293 | 387 | 2-454 | 807 | Gln-23 to Asp-28, | | | |
| | | | | | | Arg-59 to Asn-64, | | | |
| | | | | | | Ala-82 to His-88, | | | |
| | | | | | | Arg-97 to Thr-106. | | | |
| 195 | HE9TK49 | 856343 | 205 | 2-328 | 625 | | AR061: 3, AR089: 1 | 17q22 | 109270, |
| | | | | | | | H0144: 2 and S0053: 1. | | 109270, |
| | | | | | | | | | 109270, |
| | | | | | | | | | 109270, |
| | | | | | | | | | 109270, |
| | | | | | | | | | 120150, |
| | | | | | | | | | 120150, |
| | | | | | | | | | 120150, |
| | | | | | | | | | 139250, |
| | | | | | | | | | 148065, |
| | | | | | | | | | 148080, |
| | | | | | | | | | 150200, |
| | | | | | | | | | 154275, |
| | | | | | | | | | 171190, |
| | | | | | | | | | 176960, |
| | | | | | | | | | 185800, |
| | | | | | | | | | 221820, |
| | | | | | | | | | 249000, |
| | | | | | | | | | 253250, |
| | | | | | | | | | 600525, |
| | | | | | | | | | 600852, |
| | | | | | | | | | 601844, |
| 196 | HORBO54 | 870674 | 206 | 115-549 | 626 | | AR061: 4, AR089: 2 | | |
| | | | | | | | L0758: 4, H0556: 3, | | |
| | | | | | | | H0657: 3, H0435: 3, | | |
| | | | | | | | L0749: 3, L0777: 3, | | |
| | | | | | | | H0677: 3, S0045: 2, | | |
| | | | | | | | H0619: 2, H0586: 2, | | |
| | | | | | | | H0032: 2, H0616: 2, | | |
| | | | | | | | L0772: 2, H0701: 2, | | |
| | | | | | | | H0547: 2, S0328: 2, | | |
| | | | | | | | H0543: 2, S0040: 1, | | |
| | | | | | | | S6024: 1, H0295: 1, | | |
| | | | | | | | H0650: 1, S0116: 1, | | |
| | | | | | | | H0661: 1, H0664: 1, | | |
| | | | | | | | S0444: 1, H0580: 1, | | |
| | | | | | | | S0132: 1, S0278: 1, | | |
| | | | | | | | H0486: 1, H0013: 1, | | |
| | | | | | | | H0069: 1, H0427: 1, | | |
| | | | | | | | H0004: 1, H0530: 1, | | |
| | | | | | | | H0050: 1, H0292: 1, | | |
| | | | | | | | T0006: 1, H0553: 1, | | |
| | | | | | | | H0181: 1, L0455: 1, | | |
| | | | | | | | H0038: 1, H0413: 1, | | |
| | | | | | | | T0042: 1, H0494: 1, | | |
| | | | | | | | H0561: 1, H0509: 1, | | |
| | | | | | | | S0344: 1, S0210: 1, | | |
| | | | | | | | L0768: 1, H0144: 1, | | |
| | | | | | | | L0438: 1, H0520: 1, | | |
| | | | | | | | H0519: 1, H0593: 1, | | |
| | | | | | | | H0539: 1, H0521: 1, | | |
| | | | | | | | H0522: 1, H0134: 1, | | |
| | | | | | | | H0555: 1, S0028: 1, | | |
| | | | | | | | L0743: 1, L0740: 1, | | |
| | | | | | | | L0752: 1, L0755: 1, | | |
| | | | | | | | L0759: 1, H0445: 1, | | |
| | | | | | | | L0596: 1, L0595: 1, | | |
| | | | | | | | H0542: 1, H0423: 1 and | | |
| | | | | | | | S0424: 1. | | |
| 197 | HFKFL92 | 1217598 | 207 | 543-28 | 627 | Val-43 to Gln-60, | AR089: 68, AR061: 37 | | |
| | | | | | | Gly-62 to Cys-70, | L0742: 10, L0731: 4, | | |
| | | | | | | Arg-76 to Arg-96, | L0748: 3, L0747: 3, | | |
| | | | | | | Pro-101 to Gly-115, | L0758: 3, L0763: 2, | | |
| | | | | | | Cys-146, Gly-151. | L0764: 2, L0766: 2, | | |
| | | | | | | | L0439: 2, H0556: 1, | | |
| | | | | | | | S0376: 1, S0222: 1, | | |
| | | | | | | | H0156: 1, S0010: 1, | | |
| | | | | | | | S0474: 1, H0123: 1, | | |
| | | | | | | | H0012: 1, H0083: 1, | | |
| | | | | | | | H0328: 1, H0688: 1, | | |
| | | | | | | | H0412: 1, S0210: 1, | | |
| | | | | | | | L0644: 1, L0662: 1, | | |
| | | | | | | | L0806: 1, L0776: 1, | | |
| | | | | | | | L0655: 1, L0665: 1, | | |
| | | | | | | | L0438: 1, H0659: 1, | | |
| | | | | | | | S0380: 1, S0032: 1 and | | |
| | | | | | | | H0543: 1. | | |
| | | 880139 | 388 | 59-388 | 808 | | | | |
| 198 | HETLT82 | 883273 | 208 | 67-654 | 628 | Gln-21 to Lys-29, | AR061: 4, AR089: 2 | | |
| | | | | | | Leu-112 to Gly-123. | L0758: 7, H0046: 4, | | |
| | | | | | | | S0420: 1, S0052: 1 and | | |
| | | | | | | | S0216: 1. | | |
| 199 | HWAEU35 | 1199854 | 209 | 3-548 | 629 | Arg-25 to Arg-39, | AR051: 268, AR054: | | |
| | | | | | | Asp-86 to Arg-91, | 153, AR050: 68, | | |
| | | | | | | Ser-122 to Lys-129, | AR089: 54, AR061: 9 | | |
| | | | | | | Ala-132 to Gly-142, | H0581: 1 | | |
| | | | | | | Pro-174 to Ser-182. | | | |
| | | 887166 | 389 | 1-474 | 809 | Arg-20 to Arg-36. | | | |
| 200 | HMWDB84 | 1002167 | 210 | 1-1029 | 630 | Ser-1 to Arg-7, | AR054; 26, AR050: 23, | | |
| | | | | | | Leu-16 to Ser-22, | AR061: 22, AR061: 2, | | |
| | | | | | | Ala-29 to Val-37, | AR089: 1 | | |
| | | | | | | Arg-58 to Glu-65, | H0521: 4, H0056: 2, | | |
| | | | | | | Glu-82 to Asp-87, | L0770: 2, L0761: 2, | | |
| | | | | | | Val-117 to Arg-124, | L0766: 2, L0666: 2, | | |
| | | | | | | Thr-145 to Gln-150, | H0265: 1, H0341: 1, | | |
| | | | | | | His-188 to Glu-194, | S0354: 1, H0580: 1, | | |
| | | | | | | Asn-203 to Asn-209, | S0046: 1, S0388: 1, | | |
| | | | | | | Gln-272 to Thr-284, | H0063: 1, H0633: 1, | | |
| | | | | | | Pro-287 to Asn-294. | L0769: 1, L0768: 1, | | |
| | | | | | | | L0774: 1, L0775: 1, | | |
| | | | | | | | L0659: 1, H0658: 1, | | |
| | | | | | | | L0439: 1 and L0779: 1. | | |
| | | 899872 | 390 | 1-1035 | 810 | Gly-1 to Arg-9, | | | |
| | | | | | | Leu-18 to Ser-24, | | | |
| | | | | | | Ala-31 to Val-39, | | | |
| | | | | | | Arg-60 to Glu-67, | | | |
| | | | | | | Glu-84 to Asp-89, | | | |
| | | | | | | Val-119 to Arg-126, | | | |
| | | | | | | Thr-147 to Gln-152, | | | |
| | | | | | | His-190 to Glu-196, | | | |
| | | | | | | Asn-205 to Asn-211, | | | |
| | | | | | | Gln-274 to Thr-286, | | | |
| | | | | | | Pro-289 to Asn-296. | | | |
| | | 944569 | 391 | 568-825 | 811 | Ala-47 to Asp-54, | | | |
| | | | | | | Ser-67 to Pro-73. | | | |
| | | 944570 | 392 | 3-1034 | 812 | Gln-1 to Arg-8, | | | |
| | | | | | | Leu-17 to Ser-23, | | | |
| | | | | | | Ala-30 to Val-38, | | | |
| | | | | | | Arg-59 to Glu-66, | | | |
| | | | | | | Glu-83 to Asp-88, | | | |
| | | | | | | Val-118 to Arg-125, | | | |
| | | | | | | Thr-146 to Gln-151. | | | |
| 201 | HMSNC17 | 1137873 | 211 | 1-549 | 631 | Arg-19 to Ser-24, | AR089: 44, AR061: 32 | | |
| | | | | | | Pro-66 to Thr-73, | AR054: 12, AR050: 1, | | |
| | | | | | | Lys-137 to Ser-147, | AR051: 0 | | |
| | | | | | | Asp-153 to Glu-160, | L0596: 4, L0779: 3, | | |
| | | | | | | Asp-176 to Tyr-183. | H0486: 2, L0766: 2, | | |
| | | | | | | | L0748: 2, L0752: 2, | | |
| | | | | | | | H0459: 1, L0717: 1, | | |
| | | | | | | | S0280: 1, H0014: 1, | | |
| | | | | | | | H0615: 1, H0591: 1, | | |
| | | | | | | | S0426: 1, L0649: 1, | | |
| | | | | | | | L0776: 1, H0658: 1, | | |
| | | | | | | | H0518: 1, H0576: 1, | | |
| | | | | | | | L0747: 1, L0777: 1, | | |
| | | | | | | | H0423: 1 and H0422: 1. | | |
| | | 903712 | 393 | 136-654 | 813 | Pro-10 to His-16, | | | |
| | | | | | | Pro-28 to Asp-38. | | | |
| 202 | HPWAY10 | 1123453 | 212 | 625-2 | 632 | Gln-1 to Leu-14, | AR089: 1, AR061: 0 | | |
| | | | | | | Tyr-20 to Cys-32, | H0341: 1, H0013: 1 | | |
| | | | | | | His-52 to Tyr-58, | and S0044: 1. | | |
| | | | | | | Ser-74 to Lys-90, | | | |
| | | | | | | His-108 to Tyr-114, | | | |
| | | | | | | His-136 to Tyr-142. | | | |
| | | 908549 | 394 | 149-466 | 814 | Cys-36 to Asn-43, | | | |
| | | | | | | Gln-74 to Trp-79. | | | |
| 203 | HOHCE52 | 1135291 | 213 | 857-3 | 633 | Ala-26 to Leu-31, | AR089: 1, AR061: 0 | | |
| | | | | | | Phe-39 to Ala-46, | H0609: 1, H0081: 1, | | |
| | | | | | | Pro-60 to His-69, | S0250: 1, H0521: 1, | | |
| | | | | | | Gly-98 to Met-104, | L0439: 1 nad H0665: 1. | | |
| | | | | | | Pro-106 to Glu-116, | | | |
| | | | | | | Asp-124 to Ala-132, | | | |
| | | | | | | Arg-145 to Gly-150, | | | |
| | | | | | | Pro-152 to Ala-159, | | | |
| | | | | | | Arg-166 to Gly-173, | | | |
| | | | | | | Pro-175 to Ala-180, | | | |
| | | | | | | His-182 to Thr-189, | | | |
| | | | | | | Pro-191 to Lys-199, | | | |
| | | | | | | Ser-201 to Tyr-216, | | | |
| | | | | | | Gly-224 to Gln-235, | | | |
| | | | | | | His-238 to Ser-256, | | | |
| | | | | | | Arg-264 to Ala-273, | | | |
| | | | | | | Gln-276 to Ser-285. | | | |
| | | 909141 | 395 | 3-377 | 815 | Arg-6 to Gly-13, | | | |
| | | | | | | Pro-15 to Ala-20, | | | |
| | | | | | | His-22 to Thr-29, | | | |
| | | | | | | Pro-31 to Lys-39, | | | |
| | | | | | | Ser-41 to Tyr-56, | | | |
| | | | | | | Gly-64 to Gln-75, | | | |
| | | | | | | His-78 to Ser-96, | | | |
| | | | | | | Arg-104 to Ala-113, | | | |
| | | | | | | Gln-116 to Ser-125. | | | |
| 204 | HLHCR16 | 910123 | 214 | 2-3418 | 634 | Pro-9 to Pro-15, | AR050: 9, AR061: 2, | | |
| | | | | | | Gly-49 to Trp-54, | AR054: 2, AR089: 2, | | |
| | | | | | | Ser-91 to Phe-96, | AR051: 2 | | |
| | | | | | | Thr-109 to Asp-115, | L0754: 14, L0777: 13, | | |
| | | | | | | Cys-124 to Ile-130, | H0553: 10, L0600: 7, | | |
| | | | | | | Cys-164 to Trp-169, | L0748: 6, L0803: 4, | | |
| | | | | | | Thr-193 to Asp-207, | L0749: 4, UNKWN: 4, | | |
| | | | | | | Thr-215 to Tyr-220, | H0624: 3, S0280: 3, | | |
| | | | | | | Thr-228 to Ser-240, | S0126: 3, L0747: 3, | | |
| | | | | | | Glu-269 to Ser-276, | S0282: 2, H0024: 2, | | |
| | | | | | | Glu-327 to Ala-334, | H0030: 2, H0031: 2, | | |
| | | | | | | Asn-376 to Asp-392, | H0040: 2, L0438: 2, | | |
| | | | | | | Gln-420 to Asn-428, | S0028: 2, L0743: 2, | | |
| | | | | | | Tyr-547 to Ser-566, | L0596: 2, L0603: 2, | | |
| | | | | | | Ala-616 to Gly-623, | S0212: 1, H0270: 1, | | |
| | | | | | | Pro-625 to Ser-631, | H0244: 1, H0427: 1, | | |
| | | | | | | Ser-647 to Val-653, | H0251: 1, H0309: 1, | | |
| | | | | | | Gly-676 to Pro-681, | S0338: 1, S0340: 1, | | |
| | | | | | | Tyr-720 to Glu-740, | S0250: 1, H0252: 1, | | |
| | | | | | | Ile-742 to Lys-748, | H0039: 1, L0143: 1, | | |
| | | | | | | Asp-792 to Cys-804, | H0038: 1, L0659: 1, | | |
| | | | | | | Leu-841 to Val-848, | L0565: 1, H0593: 1, | | |
| | | | | | | Gln-850 to Gly-857, | H0684: 1, H0518: 1, | | |
| | | | | | | Asp-879 to Gly-886, | S0390: 1, S0260: 1 and | | |
| | | | | | | His-906 to Trp-913, | H0506: 1. | | |
| | | | | | | Pro-968 to Thr-975, | | | |
| | | | | | | Gln-1051 to Ser-1057, | | | |
| | | | | | | Pro-1092 to Cys-1099, | | | |
| | | | | | | Lys-1113 to Cys-1120, | | | |
| | | | | | | Trp-1126 to Phe-1139. | | | |
| | | 965511 | 396 | 2-1492 | 816 | Pro-9 to Pro-15, | | | |
| | | | | | | Gly-49 to Trp-54, | | | |
| | | | | | | Ser-91 to Phe-96, | | | |
| | | | | | | Thr-109 to Asp-115, | | | |
| | | | | | | Cys-124 to Ile-130, | | | |
| | | | | | | Cys-164 to Trp-169, | | | |
| | | | | | | Thr-193 to Asp-207, | | | |
| | | | | | | Thr-215 to Tyr-220, | | | |
| | | | | | | Thr-228 to Ser-240, | | | |
| | | | | | | Glu-269 to Ser-276, | | | |
| | | | | | | Glu-327 to Ala-334, | | | |
| | | | | | | Asn-376 to Asp-392, | | | |
| | | | | | | Gln-420 to Asn-428. | | | |
| 205 | HFKJO15 | 910828 | 215 | 3-539 | 635 | Ser-1 to Phe-13, | AR061: 0, AR089: 0 | | |
| | | | | | | Ala-15 to Gln-22, | L0769: 3, L0803: 3, | | |
| | | | | | | Pro-39 to Cys-50, | L0748: 3, L0749: 3, | | |
| | | | | | | Gly-58 to Gln-69, | H0574: 2, H0046: 2, | | |
| | | | | | | Pro-84 to Asp-92, | H0620: 2, L0794: 2, | | |
| | | | | | | Tyr-100 to Cys-117, | L0776: 2, L0659: 2, | | |
| | | | | | | Lys-123 to Ala-129, | L0439: 2, L0754: 2, | | |
| | | | | | | Asp-134 to Asp-148, | L0747: 2, L0777: 2, | | |
| | | | | | | Gly-157 to Arg-167. | L0755: 2, L0605: 2, | | |
| | | | | | | | L0593: 2, H0686: 1, | | |
| | | | | | | | S0360: 1, L0717: 1, | | |
| | | | | | | | H0069: 1, H0575: 1, | | |
| | | | | | | | H0546: 1, H0024: 1, | | |
| | | | | | | | S0388: 1, H0510: 1, | | |
| | | | | | | | H0266: 1, H0644: 1, | | |
| | | | | | | | H0163: 1, H0090: 1, | | |
| | | | | | | | H0634: 1, H0561: 1, | | |
| | | | | | | | H0695: 1, L0763: 1, | | |
| | | | | | | | L0804: 1, L0774: 1, | | |
| | | | | | | | L0775: 1, L0783: 1, | | |
| | | | | | | | L0809: 1, L0666: 1, | | |
| | | | | | | | L0665: 1, L0438: 1, | | |
| | | | | | | | H0658: 1, H0539: 1, | | |
| | | | | | | | S0152: 1, H0522: 1, | | |
| | | | | | | | L0740: 1, L0757: 1, | | |
| | | | | | | | L0603: 1, S0276: 1 and | | |
| | | | | | | | H0542: 1. | | |
| 206 | HEMCL65 | 910900 | 216 | 3-368 | 636 | Val-7 to Arg-13. | AR054: 8, AR051: 3, | | |
| | | | | | | | AR061: 2, AR089: 1, | | |
| | | | | | | | AR050: 0 | | |
| | | | | | | | S0046: 5, L0747: 4, | | |
| | | | | | | | H0575: 3, H0266: 3, | | |
| | | | | | | | L0750: 3, S0045: 2, | | |
| | | | | | | | H0150: 2, H0012: 2, | | |
| | | | | | | | H0039: 2, H0622: 2, | | |
| | | | | | | | L0751: 2, L0749: 2, | | |
| | | | | | | | L0780: 2, H0445: 2, | | |
| | | | | | | | L0605: 2, L0599: 2, | | |
| | | | | | | | H0171: 1, T0049: 1, | | |
| | | | | | | | H0261: 1, H0587: 1, | | |
| | | | | | | | L0021: 1, H0599: 1, | | |
| | | | | | | | H0253: 1, T0048: 1, | | |
| | | | | | | | H0024: 1, S0051: 1, | | |
| | | | | | | | L0483: 1, H0644: 1, | | |
| | | | | | | | H0268: 1, T0004: 1, | | |
| | | | | | | | H0647: 1, L0771: 1, | | |
| | | | | | | | L0662: 1, L0775: 1, | | |
| | | | | | | | L0512: 1, L0659: 1, | | |
| | | | | | | | L0790: 1, S3012: 1, | | |
| | | | | | | | S0028: 1, L0743: 1, | | |
| | | | | | | | H0444: 1, L0588: 1, | | |
| | | | | | | | L0603: 1 and H0506: 1. | | |
| 207 | HMAMB94 | 910909 | 217 | 3-587 | 637 | Trp-1 to Gly-6, | AR061: 1, AR089: 1 | | |
| | | | | | | Gln-20 to Asn-26, | H0266: 2, H0644: 2, | | |
| | | | | | | Pro-30 to Glu-35, | H0341: 1, S0278: 1, | | |
| | | | | | | Asn-43 to Tyr-50, | H0051: 1, L0602: 1 and | | |
| | | | | | | Ser-57 to Pro-65, | L0601: 1. | | |
| | | | | | | Ser-75 to Thr-82, | | | |
| | | | | | | Lys-98 to Gly-107, | | | |
| | | | | | | Asp-119 to Asn-125, | | | |
| | | | | | | Gly-159 to Glu-166. | | | |
| 208 | HAHFI44 | 1135975 | 218 | 1-792 | 638 | Gly-1 to Gln-11, | AR061: 6, AR089: 2 | | |
| | | | | | | Leu-80 to Thr-87, | L0757: 3, L0591: 3, | | |
| | | | | | | Asn-94 to Asn-99, | L0622: 1, H0599: 1, | | |
| | | | | | | Lys-150 to Thr-155, | H0144: 1, H0682: 1, | | |
| | | | | | | Pro-157 to Ser-164, | H0539: 1, S0192: 1 and | | |
| | | | | | | His-166 to Gly-171, | S0276: 1. | | |
| | | | | | | Ala-180 to Gly-186, | | | |
| | | | | | | Pro-223 to Gly-229. | | | |
| | | 910942 | 397 | 226-702 | 817 | Pro-1 to Thr-9, | | | |
| | | | | | | Asn-16 to Asn-21, | | | |
| | | | | | | Lys-72 to Thr-77, | | | |
| | | | | | | Pro-79 to Ser-86, | | | |
| | | | | | | His-88 to Gly-93, | | | |
| | | | | | | Ala-102 to Gly-108. | | | |
| 209 | HKMLN95 | 914083 | 219 | 2-583 | 639 | | AR089: 7, AR061: 2 | | |
| | | | | | | | S0003: 5, S0354: 2, | | |
| | | | | | | | S0214: 2, H0519: 2, | | |
| | | | | | | | H0689: 2, H0522: 2, | | |
| | | | | | | | L0748: 2, L0439: 2, | | |
| | | | | | | | L0731: 2, L0759: 2, | | |
| | | | | | | | H0171: 1, T0002: 1, | | |
| | | | | | | | S0040: 1, H0669: 1, | | |
| | | | | | | | S0356: 1, S0360: 1, | | |
| | | | | | | | H0431: 1, H0586: 1, | | |
| | | | | | | | H0574: 1, H0632: 1, | | |
| | | | | | | | H0156: 1, H0590: 1, | | |
| | | | | | | | T0110: 1, L0471: 1, | | |
| | | | | | | | S6028: 1, H0628: 1, | | |
| | | | | | | | S0036: 1, H0494: 1, | | |
| | | | | | | | S0450: 1, S0144: 1, | | |
| | | | | | | | L0803: 1, L0438: 1, | | |
| | | | | | | | H0520: 1, H0547: 1, | | |
| | | | | | | | H0660: 1, S0328: 1, | | |
| | | | | | | | H0521: 1, S0434: 1, | | |
| | | | | | | | L0605: 1, L0599: 1, | | |
| | | | | | | | L0593: 1 and H0543: 1. | | |
| 210 | HCQCI06 | 915000 | 220 | 3-764 | 640 | Arg-16 to Ile-28, | AR061: 4, AR089: 2 | | |
| | | | | | | Glu-39 to Ser-46, | L0747: 6, L0777: 5, | | |
| | | | | | | Lys-52 to Leu-57, | L0794: 4, S0126: 4, | | |
| | | | | | | Glu-71 to Val-77, | S0242: 3, H0624: 2, | | |
| | | | | | | Thr-90 to Lys-114, | H0171: 2, H0014: 2, | | |
| | | | | | | Asn-141 to His-152, | L0803: 2, L0809: 2, | | |
| | | | | | | Leu-160 to Asn-171, | S0374: 2, L0779: 2, | | |
| | | | | | | Lys-249 to Asn-254. | L0759: 2, H0170: 1, | | |
| | | | | | | | S0040: 1, S0342: 1, | | |
| | | | | | | | H0344: 1, T0049: 1, | | |
| | | | | | | | S0356: 1, S0358: 1, | | |
| | | | | | | | H0486: 1, H0013: 1, | | |
| | | | | | | | L0022: 1, T0082: 1, | | |
| | | | | | | | L0105: 1, H0596: 1, | | |
| | | | | | | | H0266: 1, H0687: 1, | | |
| | | | | | | | S0250: 1, H0553: 1, | | |
| | | | | | | | L0763: 1, L0770: 1, | | |
| | | | | | | | L0662: 1, L0804: 1, | | |
| | | | | | | | L0655: 1, L0783: 1, | | |
| | | | | | | | L0787: 1, L0663: 1, | | |
| | | | | | | | L0565: 1, S0432: 1, | | |
| | | | | | | | L0744: 1, L0758: 1, | | |
| | | | | | | | L0601: 1, S0196: 1 and | | |
| | | | | | | | H0506: 1. | | |
| 211 | HE8EI09 | 1206703 | 221 | 2-2257 | 641 | Glu-20 to Ala-25, | AR089: 1, AR061: 3 | | |
| | | | | | | Val-60 to Gln-77, | H0556: 14, L0439: 14, | | |
| | | | | | | Gln-85 to Val-91, | H0265: 12, L0747: 10, | | |
| | | | | | | Gln-103 to Ile-109, | H0529: 9, H0144: 9, | | |
| | | | | | | Ser-131 to Gln-139, | H0657: 8, H0333: 8, | | |
| | | | | | | Pro-198 to Gly-213, | L0731: 8, H0521: 7, | | |
| | | | | | | Gln-249 to Ser-254, | L0748: 7, H0341: 6, | | |
| | | | | | | Gln-293 to Ser-302, | H0135: 6, L0770: 6, | | |
| | | | | | | Glu-331 to Lys-336, | L0776: 6, H0547: 6, | | |
| | | | | | | Trp-392 to Leu-417, | H0650: 5, H0024: 5, | | |
| | | | | | | Glu-432 to Ser-440, | H0040: 5, H0494: 5, | | |
| | | | | | | Ser-448 to Glu-453, | L0766: 5, L0657: 5, | | |
| | | | | | | Thr-464 to Arg-476, | L0666: 5, S0152: 5, | | |
| | | | | | | Arg-509 to Asp-522. | L0740: 5, L0779: 5, | | |
| | | | | | | | L0758: 5, H0542: 5, | | |
| | | | | | | | S0418: 4, S0045: 4, | | |
| | | | | | | | H0318: 4, H0123: 4, | | |
| | | | | | | | S0022: 4, H0032: 4, | | |
| | | | | | | | H0124: 4, H0413: 4, | | |
| | | | | | | | L0764: 4, L0375: 4, | | |
| | | | | | | | L0659: 4, L0809: 4, | | |
| | | | | | | | L0749: 4, L0752: 4, | | |
| | | | | | | | L0595: 4, H0543: 4, | | |
| | | | | | | | H0295: 3, S0212: 3, | | |
| | | | | | | | S0420: 3, H0549: 3, | | |
| | | | | | | | H0013: 3, H0052: 3, | | |
| | | | | | | | H0251: 3, L0471: 3, | | |
| | | | | | | | H0012: 3, H0594: 3, | | |
| | | | | | | | H0039: 3, H0622: 3, | | |
| | | | | | | | H0644: 3, H0551: 3, | | |
| | | | | | | | L0475: 3, L0369: 3, | | |
| | | | | | | | L0769: 3, L0521: 3, | | |
| | | | | | | | L0804: 3, L0774: 3, | | |
| | | | | | | | L0663: 3, S0126: 3, | | |
| | | | | | | | S0044: 3, S0027: 3, | | |
| | | | | | | | L0750: 3, H0445: 3, | | |
| | | | | | | | H0422: 3, T0002: 2, | | |
| | | | | | | | S0218: 2, H0662: 2, | | |
| | | | | | | | S0356: 2, S0360: 2, | | |
| | | | | | | | H0069: 2, H0599: 2, | | |
| | | | | | | | H0575: 2, H0618: 2, | | |
| | | | | | | | H0581: 2, H0620: 2, | | |
| | | | | | | | H0373: 2, H0083: 2, | | |
| | | | | | | | H0266: 2, H0271: 2, | | |
| | | | | | | | H0687: 2, S0250: 2, | | |
| | | | | | | | H0615: 2, L0194: 2, | | |
| | | | | | | | H0553: 2, H0090: 2, | | |
| | | | | | | | H0038: 2, H0059: 2, | | |
| | | | | | | | H0100: 2, T0041: 2, | | |
| | | | | | | | H0561: 2, L0761: 2, | | |
| | | | | | | | L0372: 2, L0646: 2, | | |
| | | | | | | | L0771: 2, L0662: 2, | | |
| | | | | | | | L0363: 2, L0649: 2, | | |
| | | | | | | | L0655: 2, L0783: 2, | | |
| | | | | | | | L0438: 2, H0520: 2, | | |
| | | | | | | | H0593: 2, H0435: 2, | | |
| | | | | | | | H0670: 2, H0648: 2, | | |
| | | | | | | | S0378: 2, S3014: 2, | | |
| | | | | | | | S0028: 2, L0754: 2, | | |
| | | | | | | | L0753: 2, L0757: 2, | | |
| | | | | | | | L0759: 2, L0596: 2, | | |
| | | | | | | | L0605: 2, L0591: 2, | | |
| | | | | | | | L0599: 2, L0608: 2, | | |
| | | | | | | | L0593: 2, H0423: 2, | | |
| | | | | | | | H0506: 2, L0448: 1, | | |
| | | | | | | | H0224: 1, H0656: 1, | | |
| | | | | | | | S0116: 1, S0001: 1, | | |
| | | | | | | | S0030: 1, H0255: 1, | | |
| | | | | | | | H0661: 1, H0663: 1, | | |
| | | | | | | | H0125: 1, S0354: 1, | | |
| | | | | | | | S0358: 1, S0444: 1, | | |
| | | | | | | | S0468: 1, S0132: 1, | | |
| | | | | | | | H0619: 1, H0411: 1, | | |
| | | | | | | | S0278: 1, S0222: 1, | | |
| | | | | | | | H0613: 1, H0592: 1, | | |
| | | | | | | | S0005: 1, H0497: 1, | | |
| | | | | | | | H0559: 1, H0485: 1, | | |
| | | | | | | | H0486: 1, T0039: 1, | | |
| | | | | | | | L0021: 1, S0010: 1, | | |
| | | | | | | | H0390: 1, S0049: 1, | | |
| | | | | | | | H0596: 1, H0597: 1, | | |
| | | | | | | | H0457: 1, H0041: 1, | | |
| | | | | | | | H0009: 1, N0006: 1, | | |
| | | | | | | | H0566: 1, H0050: 1, | | |
| | | | | | | | H0023: 1, H0014: 1, | | |
| | | | | | | | S0362: 1, H0051: 1, | | |
| | | | | | | | S0048: 1, T0010: 1, | | |
| | | | | | | | S6028: 1, H0028: 1, | | |
| | | | | | | | S0314: 1, H0688: 1, | | |
| | | | | | | | H0428: 1, H0617: 1, | | |
| | | | | | | | H0606: 1, H0673: 1, | | |
| | | | | | | | H0169: 1, H0674: 1, | | |
| | | | | | | | L0455: 1, H0068: 1, | | |
| | | | | | | | S0036: 1, H0163: 1, | | |
| | | | | | | | H0591: 1, H0087: 1, | | |
| | | | | | | | H0116: 1, H0477: 1, | | |
| | | | | | | | H0272: 1, H0412: 1, | | |
| | | | | | | | L0564: 1, H0560: 1, | | |
| | | | | | | | S0150: 1, H0538: 1, | | |
| | | | | | | | S0422: 1, S0002: 1, | | |
| | | | | | | | L0640: 1, L0763: 1, | | |
| | | | | | | | L0637: 1, L0667: 1, | | |
| | | | | | | | L0772: 1, L0373: 1, | | |
| | | | | | | | L0800: 1, L0641: 1, | | |
| | | | | | | | L0374: 1, L0768: 1, | | |
| | | | | | | | L0381: 1, L0803: 1, | | |
| | | | | | | | L0775: 1, L0526: 1, | | |
| | | | | | | | L0518: 1, L0782: 1, | | |
| | | | | | | | L0383: 1, L0382: 1, | | |
| | | | | | | | L0519: 1, L0544: 1, | | |
| | | | | | | | L0789: 1, L0791: 1, | | |
| | | | | | | | L0664: 1, H0698: 1, | | |
| | | | | | | | S0374: 1, S0148: 1, | | |
| | | | | | | | H0519: 1, H0689: 1, | | |
| | | | | | | | H0658: 1, S0330: 1, | | |
| | | | | | | | L0602: 1, H0522: 1, | | |
| | | | | | | | S0404: 1, S0392: 1, | | |
| | | | | | | | H0627: 1, L0742: 1, | | |
| | | | | | | | L0751: 1, L0756: 1, | | |
| | | | | | | | L0777: 1, S0434: 1, | | |
| | | | | | | | L0592: 1, L0361: 1, | | |
| | | | | | | | L0366: 1, S0011: 1, | | |
| | | | | | | | H0668: 1, H0667: 1, | | |
| | | | | | | | S0424: 1, S0462: 1, | | |
| | | | | | | | H0008: 1 and H0352: 1. | | |
| | | 915042 | 398 | 2-493 | 818 | Glu-20 to Ala-25, | | | |
| | | | | | | Val-60 to Gln-77, | | | |
| | | | | | | Gln-85 to Val-91, | | | |
| | | | | | | Gln-103 to Ile-109. | | | |
| 212 | HBODA38 | 923456 | 222 | 352-1470 | 642 | Pro-12 to Thr-23, | AR089: 39, AR061: 15 | | |
| | | | | | | Glu-49 to Val-56, | S0364: 10, H0373: 7, | | |
| | | | | | | Leu-77 to Tyr-83, | L0604: 7, H0196: 4, | | |
| | | | | | | Ala-125 to Glu-138, | L0485: 3, L0002: 1, | | |
| | | | | | | Tyr-144 to Gly-154, | H0411: 1, H0599: 1, | | |
| | | | | | | Gly-227 to Thr-233, | H0327: 1, L0471: 1, | | |
| | | | | | | His-286 to Arg-292, | L0163: 1, S0366: 1, | | |
| | | | | | | Pro-366 to Lys-373. | L0747: 1 and L0750: 1. | | |
| 213 | HCYBK19 | 925494 | 223 | 2-1348 | 643 | Glu-4 to Gly-19, | AR089: 1, AR061: 0 | | |
| | | | | | | Ser-32 to Ser-39, | L0794: 18, L0770: 10, | | |
| | | | | | | Asp-106 to Asp-114, | L0779: 9, L0438: 8, | | |
| | | | | | | Met-145 to Arg-152, | L0754: 7, H0052: 6, | | |
| | | | | | | Asn-161 to Pro-177, | H0553: 6, L0803: 6, | | |
| | | | | | | Ala-210 to Gly-216, | L0747: 6, S0222: 4, | | |
| | | | | | | Tyr-260 to Tyr-270, | H0013: 4, S0010: 4, | | |
| | | | | | | Ser-282 to His-290, | L0769: 4, L0659: 4, | | |
| | | | | | | Thr-307 to Tyr-323, | L0809: 4, L0439: 4, | | |
| | | | | | | Cys-369 to Lys-382, | L0752: 4, L0758: 4, | | |
| | | | | | | Asn-433 to Lys-441. | S6016: 3, H0244: 3, | | |
| | | | | | | | H0144: 3, S0126: 3, | | |
| | | | | | | | L0599: 3, S0046: 2, | | |
| | | | | | | | L0157: 2, H0032: 2, | | |
| | | | | | | | H0169: 2, S0036: 2, | | |
| | | | | | | | H0038: 2, H0616: 2, | | |
| | | | | | | | L0763: 2, L0761: 2, | | |
| | | | | | | | L0766: 2, L0804: 2, | | |
| | | | | | | | L0650: 2, L0775: 2, | | |
| | | | | | | | L0805: 2, L0792: 2, | | |
| | | | | | | | L0665: 2, H0520: 2, | | |
| | | | | | | | H0436: 2, L0731: 2, | | |
| | | | | | | | L0596: 2, L0592: 2, | | |
| | | | | | | | L0581: 2, L0366: 2, | | |
| | | | | | | | H0423: 2, L0393: 1, | | |
| | | | | | | | H0656: 1, L0808: 1, | | |
| | | | | | | | S0282: 1, H0662: 1, | | |
| | | | | | | | S0376: 1, S0132: 1, | | |
| | | | | | | | H0393: 1, H0411: 1, | | |
| | | | | | | | H0369: 1, H0550: 1, | | |
| | | | | | | | H0441: 1, H0333: 1, | | |
| | | | | | | | T0114: 1, H0156: 1, | | |
| | | | | | | | L0021: 1, H0085: 1, | | |
| | | | | | | | H0050: 1, H0014: 1, | | |
| | | | | | | | H0020: 1, H0051: 1, | | |
| | | | | | | | S6028: 1, H0644: 1, | | |
| | | | | | | | S0364: 1, H0124: 1, | | |
| | | | | | | | H0068: 1, H0135: 1, | | |
| | | | | | | | H0591: 1, L0564: 1, | | |
| | | | | | | | H0342: 1, H0633: 1, | | |
| | | | | | | | L0640: 1, L0638: 1, | | |
| | | | | | | | L0764: 1, L0648: 1, | | |
| | | | | | | | L0662: 1, L0768: 1, | | |
| | | | | | | | L0649: 1, L0774: 1, | | |
| | | | | | | | L0636: 1, L0789: 1, | | |
| | | | | | | | L0666: 1, L0663: 1, | | |
| | | | | | | | L0352: 1, H0547: 1, | | |
| | | | | | | | H0689: 1, H0690: 1, | | |
| | | | | | | | H0539: 1, H0555: 1, | | |
| | | | | | | | S0028: 1, L0742: 1, | | |
| | | | | | | | L0748: 1, L0745: 1, | | |
| | | | | | | | L0750: 1, L0756: 1, | | |
| | | | | | | | L0777: 1, L0780: 1, | | |
| | | | | | | | L0757: 1, L0759: 1, | | |
| | | | | | | | S0308: 1, L0588: 1, | | |
| | | | | | | | S0106: 1, S0026: 1, | | |
| | | | | | | | H0667: 1, S0276: 1, | | |
| | | | | | | | H0543: 1 and H0677: 1. | | |
| 214 | HOFNH30 | 928365 | 224 | 3-320 | 644 | | AR089: 4, AR061: 2 | | |
| | | | | | | | H0415: 13, H0414: 2, | | |
| | | | | | | | H0355: 1, H0517: 1 and | | |
| | | | | | | | H0539: 1. | | |
| 215 | HWMEV63 | 931154 | 225 | 2-454 | 645 | His-9 to Asn-26, | AR089: 1, AR061: 1 | 3q21-q25 | 106165, |
| | | | | | | Pro-47 to Ser-61, | S0358: 1 and H0580: 1. | | 117700, |
| | | | | | | Arg-116 to Thr-122. | | | 117700, |
| | | | | | | | | | 150210, |
| | | | | | | | | | 169600, |
| | | | | | | | | | 180380, |
| | | | | | | | | | 180380, |
| | | | | | | | | | 180380, |
| | | | | | | | | | 190000, |
| | | | | | | | | | 203500, |
| | | | | | | | | | 222900, |
| | | | | | | | | | 232050, |
| | | | | | | | | | 276902, |
| | | | | | | | | | 600882, |
| | | | | | | | | | 601199, |
| | | | | | | | | | 601199, |
| | | | | | | | | | 601199, |
| | | | | | | | | | 601471, |
| | | | | | | | | | 601682 |
| 216 | HUUDH57 | 1156174 | 226 | 2-2185 | 646 | Gly-1 to Pro-6, | AR089: 11, AR061: 1 | | |
| | | | | | | Pro-58 to Thr-64, | H0543: 4, S0354: 3, | | |
| | | | | | | Pro-121 to Asp-128, | H0423: 3, H0656: 2, | | |
| | | | | | | Asp-196 to Ile-214, | L0749: 2, H0306: 1, | | |
| | | | | | | Lys-252 to Leu-263, | H0638: 1, S0356: 1, | | |
| | | | | | | Ser-284 to Thr-289, | S0358: 1, S0360: 1, | | |
| | | | | | | Leu-373 to Asp-378, | H0637: 1, S0046: 1, | | |
| | | | | | | Leu-382 to Ser-387, | S0132: 1, H0486: 1, | | |
| | | | | | | Arg-504 to Gly-511, | H0090: 1, S0112: 1, | | |
| | | | | | | Ser-586 to Lys-591, | T0042: 1, H0494: 1, | | |
| | | | | | | Thr-598 to Lys-604, | S0210: 1, L0770: 1, | | |
| | | | | | | Ser-674 to Gln-680, | L0662: 1, L0659: 1, | | |
| | | | | | | Leu-713 to Pro-718. | L0665: 1, H0682: 1, | | |
| | | | | | | | L0779: 1, H0445: 1, | | |
| | | | | | | | H0653: 1 and S0424: 1. | | |
| | | 931155 | 399 | 2-2167 | 819 | Pro-52 to Thr-58, | | | |
| | | | | | | Pro-115 to Asp-122, | | | |
| | | | | | | Asp-190 to Ile-208. | | | |
| 217 | HDQFT77 | 1157001 | 227 | 3-902 | 647 | Glu-20 to Gly-32, | AR089: 16, AR061: 8 | | |
| | | | | | | Ser-35 to Glu-46, | L0803: 5, L0655: 3, | | |
| 218 | HBXBG65 | 932780 | 228 | 2-535 | 648 | Asn-1 to Arg-10, | AR089: 1, AR061: 0 | 14q32.1 | 107280, |
| | | | | | | Pro-105 to Val-114, | H0144: 2, S0038: 1 and | | 107280, |
| | | | | | | Gln-130 to Glu-140. | L0439: 1. | | 107280, |
| | | | | | | | | | 107400, |
| | | | | | | | | | 122500, |
| | | | | | | | | | 186960, |
| | | | | | | | | | 245200, |
| | | | | | | | | | 601841, |
| 219 | HMVDZ78 | 938574 | 229 | 2-250 | 649 | | AR089: 2, AR061: 2 | | |
| | | | | | | | L0659: 8, L0666: 8, | | |
| | | | | | | | L0751: 7, L0665: 6, | | |
| | | | | | | | L0528: 5, L0743: 5, | | |
| | | | | | | | L0663: 4, H0052: 3, | | |
| | | | | | | | L0638: 3, L0646: 3, | | |
| | | | | | | | L0764: 3, L0662: 3, | | |
| | | | | | | | L0774: 3, L0747: 3, | | |
| | | | | | | | H0668: 3, S0192: 3, | | |
| | | | | | | | H0150: 2, H0620: 2, | | |
| | | | | | | | H0413: 2, H0649: 2, | | |
| | | | | | | | S0426: 2, L0763: 2, | | |
| | | | | | | | L0769: 2, L0648: 2, | | |
| | | | | | | | L0766: 2, L0653: 2, | | |
| | | | | | | | L0657: 2, S0126: 2, | | |
| | | | | | | | H0670: 2, L0754: 2, | | |
| | | | | | | | L0749: 2, H0685: 1, | | |
| | | | | | | | S0040: 1, H0650: 1, | | |
| | | | | | | | S0212: 1, H0255: 1, | | |
| | | | | | | | S0420: 1, S0045: 1, | | |
| | | | | | | | H0261: 1, H0391: 1, | | |
| | | | | | | | L0022: 1, H0581: 1, | | |
| | | | | | | | H0597: 1, H0544: 1, | | |
| | | | | | | | H0545: 1, H0123: 1, | | |
| | | | | | | | H0012: 1, H0024: 1, | | |
| | | | | | | | H0188: 1, S0250: 1, | | |
| | | | | | | | L0483: 1, H0617: 1, | | |
| | | | | | | | H0551: 1, H0494: 1, | | |
| | | | | | | | S0210: 1, L0372: 1, | | |
| | | | | | | | L0643: 1, L0773: 1, | | |
| | | | | | | | L0803: 1, L0650: 1, | | |
| | | | | | | | L0775: 1, L0375: 1, | | |
| | | | | | | | L0651: 1, L0525: 1, | | |
| | | | | | | | L0776: 1, L0661: 1, | | |
| | | | | | | | L0629: 1, L0664: 1, | | |
| | | | | | | | S0053: 1, L0565: 1, | | |
| | | | | | | | H0690: 1, H0682: 1, | | |
| | | | | | | | H0658: 1, H0648: 1, | | |
| | | | | | | | H0672: 1, H0539: 1, | | |
| | | | | | | | H0521: 1, S0044: 1, | | |
| | | | | | | | S0188: 1, H0555: 1, | | |
| | | | | | | | S3012: 1, L0752: 1, | | |
| | | | | | | | L0753: 1, L0757: 1, | | |
| | | | | | | | L0758: 1, L0592: 1, | | |
| | | | | | | | L0601: 1, L0603: 1 and | | |
| | | | | | | | H0352: 1. | | |
| | | 956924 | 401 | 425-126 | 821 | Gln-56 to Pro-70, | | | |
| | | | | | | Gly-78 to Gly-87. | | | |
| 220 | HE8PB92 | 1229537 | 230 | 1366-3522 | 650 | His-17 to Glu-22. | AR061: 1, AR089: 1 | | |
| | | | | | | | L0749: 8, L0591: 8, | | |
| | | | | | | | L0770: 7, L0747: 6, | | |
| | | | | | | | L0731: 5, L0439: 4, | | |
| | | | | | | | L0751: 4, L0764: 3, | | |
| | | | | | | | L0794: 3, L0789: 3, | | |
| | | | | | | | L0664: 3, H0547: 3, | | |
| | | | | | | | L0758: 3, H0486: 2, | | |
| | | | | | | | H0013: 2, H0428: 2, | | |
| | | | | | | | L0769: 2, L0659: 2, | | |
| | | | | | | | L0809: 2, L0438: 2, | | |
| | | | | | | | L0748: 2, L0740: 2, | | |
| | | | | | | | L0754: 2, L0757: 2, | | |
| | | | | | | | L0759: 2, L0485: 2, | | |
| | | | | | | | L0581: 2, L0601: 2, | | |
| | | | | | | | H0170: 1, S0040: 1, | | |
| | | | | | | | S6024: 1, S0030: 1, | | |
| | | | | | | | S0222: 1, H0331: 1, | | |
| | | | | | | | L0021: 1, S0010: 1, | | |
| | | | | | | | S0665: 1, H0581: 1, | | |
| | | | | | | | L0471: 1, H0021: 1, | | |
| | | | | | | | H0375: 1, T0023: 1, | | |
| | | | | | | | H0553: 1, H0617: 1, | | |
| | | | | | | | S0386: 1, S0039: 1, | | |
| | | | | | | | S0112: 1, H0625: 1, | | |
| | | | | | | | S0150: 1, L0646: 1, | | |
| | | | | | | | L0662: 1, L0803: 1, | | |
| | | | | | | | L0375: 1, L0666: 1, | | |
| | | | | | | | L0665: 1, L0352: 1, | | |
| | | | | | | | S0126: 1, H0647: 1, | | |
| | | | | | | | H0672: 1, L0750: 1, | | |
| | | | | | | | L0756: 1, L0779: 1, | | |
| | | | | | | | L0777: 1, L0752: 1 and | | |
| | | | | | | | L0755: 1. | | |
| | | 940805 | 402 | 2-550 | 822 | Lys-55 to Val-67. | | | |
| 221 | HSDHB12 | 941973 | 231 | 3-638 | 651 | Met-49 to Tyr-56, | AR061: 8, AR089: 3 | | |
| | | | | | | Gln-91 to Val-101, | L0803: 4, L0794: 3, | | |
| | | | | | | Pro-172 to Gln-181, | L0747: 3, H0599: 2, | | |
| | | | | | | Ser-183 to Ile-197. | L0659: 2, L0789: 2, | | |
| | | | | | | | S0364: 1, L0804: 1, | | |
| | | | | | | | H0539: 1, L0720: 1 and | | |
| | | | | | | | S0031: 1. | | |
| | | 969094 | 403 | 3-278 | 823 | | | | |
| | | 969097 | 404 | 700-182 | 824 | Met-1 to Tyr-8, | | | |
| | | | | | | Gln-43 to Val-53, | | | |
| | | | | | | Pro-124 to Gln-133, | | | |
| | | | | | | Ser-135 to Ile-149. | | | |
| 222 | HE8UL90 | 942749 | 232 | 3-641 | 652 | | AR061: 4, AR050: 3, | | |
| | | | | | | | AR054: 1, AR089: 1, | | |
| | | | | | | | AR051: 1 | | |
| | | | | | | | H0013: 1 | | |
| 223 | HTXAA15 | 1200485 | 233 | 29-418 | 653 | Pro-27 to Glu-38. | AR089: 0, AR061: 0 | | |
| | | | | | | | L0766: 2, H0265: 1 | | |
| | | | | | | | and H0623: 1. | | |
| | | 943266 | 405 | 20-289 | 825 | Pro-27 to Glu-38. | | | |
| 224 | HOFMP09 | 1194840 | 234 | 1-807 | 654 | Ala-73 to Gly-83, | AR089: 20, AR061: 9 | | |
| | | | | | | Arg-97 to Lys-103, | H0415: 1 | | |
| | | | | | | Ser-146 to Gln-153, | | | |
| | | | | | | Met-192 to Ala-208, | | | |
| | | | | | | Pro-210 to Gln-215, | | | |
| | | | | | | His-218 to Gln-226. | | | |
| | | 943358 | 406 | 1-372 | 826 | Ala-74 to Gly-84, | | | |
| | | | | | | Arg-98 to Lys-104. | | | |
| 225 | HFPEL47 | 1143388 | 235 | 2-1444 | 655 | Leu-22 to Lys-28, | AR061: 3, AR089: 2 | | |
| | | | | | | Leu-78 to Trp-84, | S0222: 1 | | |
| | | | | | | Glu-122 to Arg-128, | | | |
| | | | | | | Leu-183 to Asp-191, | | | |
| | | | | | | Thr-197 to Glu-212, | | | |
| | | | | | | Pro-327 to Trp-337, | | | |
| | | | | | | Gln-403 to Val-417, | | | |
| | | | | | | Gly-429 to Tyr-434, | | | |
| | | | | | | Asn-443 to Thr-462. | | | |
| | | 943750 | 407 | 3-605 | 827 | Leu-22 to Lys-28, | | | |
| | | | | | | Leu-78 to Trp-84, | | | |
| | | | | | | Glu-122 to Arg-128. | | | |
| 226 | HFIHF63 | 1137853 | 236 | 311-814 | 656 | His-11 to Thr-18, | AR061: 1, AR089: 1 | | |
| | | | | | | Phe-53 to Arg-59, | L0747: 3, S0250: 1, | | |
| | | | | | | Pro-68 to Gly-73, | L0777: 1, L0731: 1, | | |
| | | | | | | Gln-86 to Ile-99, | L0758: 1 and S0194: 1. | | |
| | | | | | | Phe-113 to Thr-126. | | | |
| | | 944246 | 408 | 2-610 | 828 | | | | |
| | | 973023 | 409 | 895-530 | 829 | Pro-6 to Cys-13, | | | |
| | | | | | | Pro-15 to Leu-20, | | | |
| | | | | | | Pro-47 to Gly-59, | | | |
| | | | | | | Asn-82 to Ser-88. | | | |
| 227 | HCE1I41 | 1156227 | 237 | 1-1659 | 657 | Pro-220 to Cys-225, | AR061: 1, AR089: 0 | | |
| | | | | | | Leu-346 to Ser-352, | L0439: 5, H0052: 2, | | |
| | | | | | | Glu-363 to Pro-377, | L0592: 2, H0254: 1, | | |
| | | | | | | Ser-380 to Thr-388, | L0534: 1, S0222: 1, | | |
| | | | | | | Asp-410 to Ser-418, | H0013: 1, H0599: 1, | | |
| | | | | | | Leu-450 to Ser-458, | S0010: 1, T0010: 1, | | |
| | | | | | | Ile-505 to Pro-512, | H0408: 1, S6028: 1, | | |
| | | | | | | Thr-519 to Asn-525, | L0351: 1, L0435: 1, | | |
| | | | | | | Thr-542 to Gln-549. | L0803: 1, L0804: 1, | | |
| | | | | | | | L0663: 1, S0216: 1, | | |
| | | | | | | | L0352: 1, L0743: 1, | | |
| | | | | | | | L0747: 1, L0750: 1 and | | |
| | | | | | | | H0595: 1. | | |
| | | 944433 | 410 | 325-1167 | 830 | | | | |
| 228 | HHAUD86 | 1195748 | 238 | 3-809 | 658 | Thr-1 to Leu-9, | AR089: 2, AR061: 1 | | |
| | | | | | | His-69 to Gly-76, | H0617: 14, H0124: 14, | | |
| | | | | | | Pro-78 to Asp-83, | L0747: 10, H0545: 8, | | |
| | | | | | | Ser-91 to Tyr-97, | L0757: 7, L0743: 6, | | |
| | | | | | | Leu-137 to Leu-144, | L0731: 6, L0758: 6, | | |
| | | | | | | Pro-157 to Gly-175, | L0777: 5, S0360: 4, | | |
| | | | | | | Pro-177 to Thr-182, | H0544: 4, H0024: 4, | | |
| | | | | | | Arg-228 to Tyr-233, | L0803: 4, H0170: 3, | | |
| | | | | | | Tyr-235 to Arg-246. | S0040: 3, H0333: 3, | | |
| | | | | | | | H0309: 3, L0771: 3, | | |
| | | | | | | | S0212: 2, S0358: 2, | | |
| | | | | | | | H0549: 2, H0550: 2, | | |
| | | | | | | | H0392: 2, H0253: 2, | | |
| | | | | | | | H0123: 2, H0620: 2, | | |
| | | | | | | | H0181: 2, L0769: 2, | | |
| | | | | | | | H0144: 2, L0565: 2, | | |
| | | | | | | | S0027: 2, L0751: 2, | | |
| | | | | | | | L0786: 2, L0780: 2, | | |
| | | | | | | | H0352: 2, H0624: 1, | | |
| | | | | | | | H0381: 1, S0418: 1, | | |
| | | | | | | | S0420: 1, H0208: 1, | | |
| | | | | | | | H0587: 1, H0427: 1, | | |
| | | | | | | | H0421: 1, H0150: 1, | | |
| | | | | | | | H0041: 1, H0012: 1, | | |
| | | | | | | | H0284: 1, S0250: 1, | | |
| | | | | | | | H0252: 1, H0328: 1, | | |
| | | | | | | | H0688: 1, H0428: 1, | | |
| | | | | | | | H0553: 1, H0628: 1, | | |
| | | | | | | | S0364: 1, H0163: 1, | | |
| | | | | | | | H0038: 1, H0087: 1, | | |
| | | | | | | | L0770: 1, L0637: 1, | | |
| | | | | | | | L0630: 1, L0662: 1, | | |
| | | | | | | | L0804: 1, L0774: 1, | | |
| | | | | | | | L0653: 1, L0657: 1, | | |
| | | | | | | | L0634: 1, L6059: 1, | | |
| | | | | | | | L0517: 1, L0783: 1, | | |
| | | | | | | | L0666: 1, L0665: 1, | | |
| | | | | | | | S0374: 1, H0520: 1, | | |
| | | | | | | | S0126: 1, H0682: 1, | | |
| | | | | | | | H0672: 1, S3014: 1, | | |
| | | | | | | | S0028: 1, L0744: 1, | | |
| | | | | | | | L0754: 1, L0750: 1, | | |
| | | | | | | | L0759: 1, S0260: 1, | | |
| | | | | | | | H0653: 1, S0194: 1 and | | |
| | | | | | | | L0600: 1. | | |
| | | 944835 | 411 | 3-578 | 831 | Asn-33 to Leu-41, | | | |
| | | | | | | His-101 to Gly-108, | | | |
| | | | | | | Pro-110 to Asp-115, | | | |
| | | | | | | Ser-123 to Tyr-129, | | | |
| | | | | | | Leu-169 to Leu-176. | | | |
| 229 | HFKKE19 | 947418 | 239 | 1-288 | 659 | Pro-18 to Met-23, | AR061: 6, AR089: 4 | 1 | |
| | | | | | | Asp-65 to Glu-70, | H0620: 2, H0539: 2, | | |
| | | | | | | Pro-81 to Pro-88. | H0619: 1 and L0666: 1. | | |
| 230 | HLWAR77 | 947848 | 240 | 1287-292 | 660 | Gln-97 to Pro-114, | AR050: 21, AR054: 9, | | |
| | | | | | | Trp-117 to Lys-129, | AR051: 3, AR089: 1, | | |
| | | | | | | Thr-166 to Gln-173, | AR061: 1 | | |
| | | | | | | Ser-178 to Lys-183, | H0553: 4 and L0759: 2. | | |
| | | | | | | Glu-250 to Phe-256, | | | |
| | | | | | | Ser-295 to His-301, | | | |
| | | | | | | Tyr-307 to Gln-316, | | | |
| | | | | | | Glu-322 to Ser-330. | | | |
| 231 | HWAFW39 | 1217787 | 241 | 667-1536 | 661 | Asn-56 to Val-61, | AR089: 2, AR061: 1 | | |
| | | | | | | Val-65 to Gln-70, | H0255: 1 and H0581: 1. | | |
| | | | | | | Val-78 to Gly-83, | | | |
| | | | | | | Lys-109 to Leu-120, | | | |
| | | | | | | Phe-139 to Ser-150, | | | |
| | | | | | | Met-192 to Gly-202. | | | |
| | | 947915 | 415 | 188-370 | 832 | | | | |
| 232 | HBCBF11 | 1204933 | 242 | 3-971 | 662 | His-1 to Arg-13, | AR051: 14, AR054: 10, | | |
| | | | | | | Arg-27 to Gln-32, | AR050: 2, AR089: 2, | | |
| | | | | | | Ser-85 to Gly-100, | AR061: 2 | | |
| | | | | | | Thr-119 to Gly-124, | H0592: 2, L0754: 2, | | |
| | | | | | | Asn-132 to Gln-140, | S0132: 1, H0370: 1, | | |
| | | | | | | Asp-147 to Lys-154, | H0587: 1, S0344: 1, | | |
| | | | | | | Arg-186 to Glu-202, | L0665: 1, H0682: 1 and | | |
| | | | | | | Thr-206 to Ile-211, | H0555: 1. | | |
| | | | | | | His-217 to Glu-227, | | | |
| | | | | | | Glu-234 to Ser-245, | | | |
| | | | | | | Ser-250 to Ser-259, | | | |
| | | | | | | Arg-265 to Gln-270, | | | |
| | | | | | | Gly-277 to Gly-290, | | | |
| | | | | | | Leu-305 to Gly-311. | | | |
| | | 947959 | 413 | 2-733 | 833 | Thr-1 to Arg-11, | | | |
| | | | | | | Arg-25 to Gln-30, | | | |
| | | | | | | Ser-83 to Gly-98, | | | |
| | | | | | | Thr-117 to Gly-122, | | | |
| | | | | | | Asn-130 to Gln-138, | | | |
| | | | | | | Asp-145 to Lys-152, | | | |
| | | | | | | Arg-184 to Glu-200, | | | |
| | | | | | | Thr-204 to Ile-209, | | | |
| | | | | | | His-215 to Glu-225. | | | |
| 233 | HHFME38 | 947970 | 243 | 2-643 | 663 | Pro-1 to Gln-6, | AR054 :42, AR050: 9, | | |
| | | | | | | Pro-90 to Trp-95, | AR089: 2, AR061: 2 | | |
| | | | | | | Ser-152 to Gly-165. | L0659: 7, L0777: 7, | | |
| | | | | | | | S0358: 6, H0622: 6, | | |
| | | | | | | | H0486: 5, S0360: 4, | | |
| | | | | | | | L0662: 4, H0013: 3, | | |
| | | | | | | | H0144: 3, S0328: 3, | | |
| | | | | | | | L0751: 3, L0731: 3, | | |
| | | | | | | | H0624: 2, H0619: 2, | | |
| | | | | | | | H0620: 2, H0328: 2, | | |
| | | | | | | | L0520: 2, L0764: 2, | | |
| | | | | | | | L0666: 2, H0539: 2, | | |
| | | | | | | | L0747: 2, S0116: 1, | | |
| | | | | | | | S0356: 1, S0376: 1, | | |
| | | | | | | | H0431: 1, H0600: 1, | | |
| | | | | | | | H0632: 1, H0244: 1, | | |
| | | | | | | | H0599: 1, H0123: 1, | | |
| | | | | | | | H0050: 1, H0051: 1, | | |
| | | | | | | | S0250: 1, H0688: 1, | | |
| | | | | | | | H0039: 1, H0163: 1, | | |
| | | | | | | | H0090: 1, H0591: 1, | | |
| | | | | | | | H0040: 1, H0102: 1, | | |
| | | | | | | | S0150: 1, H0647: 1, | | |
| | | | | | | | H0646: 1, L0640: 1, | | |
| | | | | | | | L0763: 1, L0768: 1, | | |
| | | | | | | | L0649: 1, L0806: 1, | | |
| | | | | | | | L0793: 1, H0690: 1, | | |
| | | | | | | | H0684: 1, H0658: 1, | | |
| | | | | | | | H0648: 1, L0779: 1, | | |
| | | | | | | | L0780: 1, L0759: 1 and | | |
| | | | | | | | S0011: 1. | | |
| 234 | HBJHS02 | 1156166 | 244 | 3-653 | 664 | Ala-38 to Gly-43, | AR061: 6, AR089: 2 | | |
| | | | | | | Ala-88 to Tyr-96, | L0740: 25, L0766: 5, | | |
| | | | | | | Thr-102 to Gln-113, | L0655: 4, H0650: 2, | | |
| | | | | | | Pro-132 to Ser-137, | H0657: 2, H0656: 2, | | |
| | | | | | | Thr-142 to Phe-164, | H0402: 2, H0581: 2, | | |
| | | | | | | Leu-203 to Thr-212. | H0306: 1, H0575: 1, | | |
| | | | | | | | H0318: 1, H0046: 1, | | |
| | | | | | | | S0038: 1, H0429: 1, | | |
| | | | | | | | H0560: 1, S0344: 1, | | |
| | | | | | | | L0761: 1, L0794: 1, | | |
| | | | | | | | L0789: 1, S0053: 1, | | |
| | | | | | | | H0689: 1, H0134: 1, | | |
| | | | | | | | L0779: 1, L0777: 1 and | | |
| | | | | | | | H0445: 1. | | |
| | | 948293 | 414 | 1-543 | 834 | Ala-39 to Gly-44, | | | |
| | | | | | | Ala-89 to Tyr-97, | | | |
| | | | | | | Thr-103 to Gln-114, | | | |
| | | | | | | Pro-133 to Ser-138, | | | |
| | | | | | | Thr-143 to Pro-149, | | | |
| | | | | | | Pro-157 to Phe-164. | | | |
| | | 957030 | 415 | 785-390 | 835 | | | | |
| 235 | HCE3J64 | 1216650 | 245 | 959-3 | 665 | Pro-10 to Asn-15, | AR089: 24, AR061: 15 | | |
| | | | | | | Asp-204 to Thr-209. | H0052: 2, L0759: 2, | | |
| | | | | | | | S0376: 1, H0333: 1, | | |
| | | | | | | | S0388: 1, L0637: 1, | | |
| | | | | | | | L0636: 1, L0742: 1 and | | |
| | | | | | | | L0439: 1. | | |
| | | 951228 | 416 | 3-593 | 836 | Thr-1 to Lys-8, | | | |
| | | | | | | Lys-26 to Asp-33, | | | |
| | | | | | | Gln-60 to Trp-70, | | | |
| | | | | | | Phe-99 to Lys-106, | | | |
| | | | | | | Asp-126 to Asn-137, | | | |
| | | | | | | Arg-139 to Glu-145, | | | |
| | | | | | | Met-157 to Tyr-164, | | | |
| | | | | | | Asn-167 to Arg-174. | | | |
| 236 | HFKHD91 | 1129627 | 246 | 895-1362 | 666 | Pro-44 to Trp-62, | AR056: 16, AR051: 8, | | |
| | | | | | | Arg-120 to Asp-128. | AR050: 6, AR061: 4, | | |
| | | | | | | | AR089: 1 | | |
| | | | | | | | L0747: 2, H0624: 1, | | |
| | | | | | | | H0171: 1, S6016: 1, | | |
| | | | | | | | H0620: 1, L0666: 1, | | |
| | | | | | | | L0665: 1 and L0777: 1. | | |
| | | 951259 | 417 | 2-460 | 837 | Gly-1 to Trp-12. | | | |
| 237 | HDAAN31 | 1204979 | 247 | 1-1278 | 667 | Ser-60 to Pro-65, | AR054: 126, AR050: 115, | | |
| | | | | | | Thr-105 to Thr-112, | AR051: 104, | | |
| | | | | | | Gln-147 to Gly-153, | AR089: 13, AR061: 5 | | |
| | | | | | | Glu-163 to Thr-170, | L0439: 5, L0794: 3, | | |
| | | | | | | Lys-175 to Lys-181, | L0758: 3, S6024: 2, | | |
| | | | | | | Ala-186 to Val-191, | S0010: 2, S0031: 2, | | |
| | | | | | | Trp=263 to Leu-284, | S0282: 1, H0497: 1, | | |
| | | | | | | Ile-298 to Thr-307, | H0616: 1, L0807: 1, | | |
| | | | | | | Ser-309 to Ser-329, | L0438: 1, H0520: 1, | | |
| | | | | | | Arg-382 to Thr-400. | H0539: 1, L0740: 1, | | |
| | | | | | | | L0779: 1, L0777: and | | |
| | | | | | | | L0589: 1. | | |
| | | 951450 | 418 | 1-777 | 838 | Asn-1 to Val-8, | | | |
| | | | | | | Ser-65 to Pro-70, | | | |
| | | | | | | Thr-110 to Thr-117, | | | |
| | | | | | | Gln-152 to Gly-158, | | | |
| | | | | | | Glu-168 to Thr-175, | | | |
| | | | | | | Lys-180 to Gln-190. | | | |
| 238 | HE8AM92 | 1162779 | 248 | 158-1141 | 668 | Met-9 to Glu-16, | AR061: 28, AR089: 11 | | |
| | | | | | | Glu-41 to Trp-47, | L0439: 21, L0438: 13, | | |
| | | | | | | Arg-55 to Glu-62, | H0144: 6, H0521: 6, | | |
| | | | | | | Asp-135 to Ile-146, | H0543: 5, H0013: 4, | | |
| | | | | | | Gly-154 to Gly-160, | S0003: 4, L0740: 4, | | |
| | | | | | | Met-207 to Phe-214, | L0766: 3, L0759: 3, | | |
| | | | | | | Ser-245 to Lys-252, | L0588: 3, S0116: 2, | | |
| | | | | | | Gln-282 to Gln-288. | H0662: 2, S0358: 2, | | |
| | | | | | | | L0738: 2, H0046: 2, | | |
| | | | | | | | S0214: 2, H0039: 2, | | |
| | | | | | | | H0591: 2, H0264: 2, | | |
| | | | | | | | H0560: 2, L0770: 2, | | |
| | | | | | | | L0764: 2, L0803: 2, | | |
| | | | | | | | L0774: 2, L0659: 2, | | |
| | | | | | | | L0666: 2, H0670: 2, | | |
| | | | | | | | H0672: 2, L0743: 2, | | |
| | | | | | | | L0749: 2, L0752: 2, | | |
| | | | | | | | L0731: 2, L0758: 2, | | |
| | | | | | | | H0445: 2, H0170: 1, | | |
| | | | | | | | H0265: 1, H0583: 1, | | |
| | | | | | | | H0657: 1, S0282: 1, | | |
| | | | | | | | S0376: 1, S0360: 1, | | |
| | | | | | | | H0580: 1, H0261: 1, | | |
| | | | | | | | S0222: 1, H0586: 1, | | |
| | | | | | | | H0497: 1, L0021: 1, | | |
| | | | | | | | H0575: 1, H0036: 1, | | |
| | | | | | | | H0318: 1, H0581: 1, | | |
| | | | | | | | H0251: 1, T0115: 1, | | |
| | | | | | | | L0040: 1, H0327: 1, | | |
| | | | | | | | S0388: 1, T0010: 1, | | |
| | | | | | | | H0266: 1, H0687: 1, | | |
| | | | | | | | S0250: 1, S0022: 1, | | |
| | | | | | | | H0622: 1, S0036: 1, | | |
| | | | | | | | H0090: 1, H0040: 1, | | |
| | | | | | | | T0067: 1, H0488: 1, | | |
| | | | | | | | H0413: 1, H0494: 1, | | |
| | | | | | | | S0150: 1, H0641: 1, | | |
| | | | | | | | S0002: 1, L0598: 1, | | |
| | | | | | | | H0529: 1, L0374: 1, | | |
| | | | | | | | L0771: 1, L0773: 1, | | |
| | | | | | | | L0521: 1, L0794: 1, | | |
| | | | | | | | L0775: 1, L0655: 1, | | |
| | | | | | | | L0606: 1, L0657: 1, | | |
| | | | | | | | L0663: 1, S0374: 1, | | |
| | | | | | | | H0520: 1, S0126: 1, | | |
| | | | | | | | H0659: 1, S0152: 1, | | |
| | | | | | | | S0432: 1, S0028: 1, | | |
| | | | | | | | L0750: 1, L0779: 1, | | |
| | | | | | | | L0777: 1, H0707: 1, | | |
| | | | | | | | L0589: 1, L0599: 1, | | |
| | | | | | | | L0593: 1, H0136: 1, | | |
| | | | | | | | S0242: 1, H0423: 1 and | | |
| | | | | | | | H0422: 1. | | |
| | | 952610 | 419 | 157-603 | 839 | Met-9 to Glu-16, | | | |
| | | | | | | Glu-41 to Trp-47, | | | |
| | | | | | | Arg-55 to Glu-62, | | | |
| | | | | | | Asp-135 to Pro-149. | | | |
| 239 | HSXBF22 | 952744 | 249 | 252-1034 | 669 | Ala-27 to Ala-32, | AR089: 1, AR061: 0 | | |
| | | | | | | Lys-75 to Arg-82, | H0265: 6, H0556: 3, | | |
| | | | | | | Glu-124 to Arg-130, | H0250: 2, L0770: 2, | | |
| | | | | | | Gln-156 to Gln-163, | H0543: 2, S0001: 1, | | |
| | | | | | | Glu-174 to Arg-179, | H0455: 1, H0051: 1, | | |
| | | | | | | Pro-217 to Gly-222, | S6028: 1, H0111: 1, | | |
| | | | | | | Pro-224 to Asp-240. | S0036: 1, H0040: 1, | | |
| | | | | | | | T0041: 1, H0561: 1, | | |
| | | | | | | | S0150: 1, L0769: 1, | | |
| | | | | | | | L0809: 1, L0788: 1, | | |
| | | | | | | | H0521: 1, H0696: 1, | | |
| | | | | | | | L0741: 1, L0756: 1 and | | |
| | | | | | | | S0260: 1. | | |
| | | 952874 | 420 | 252-1025 | 840 | Ala-27 to Ala-32, | | | |
| | | | | | | Lys-75 to Arg-82, | | | |
| | | | | | | Glu-124 to Arg-130, | | | |
| | | | | | | Gln-156 to Gln-163, | | | |
| | | | | | | Glu-174 to Arg-179, | | | |
| | | | | | | Pro-217 to Gly-222, | | | |
| | | | | | | Pro-224 to Asp-240. | | | |
| 240 | HUSXE73 | 1125845 | 250 | 1641-700 | 670 | Pro-21 to Ala-31, | AR089: 21, AR061: 9 | | |
| | | | | | | Gly-70 to Arg-84, | L0794: 11, L0803: 5, | | |
| | | | | | | Pro-131 to Gly-138, | L0747: 5, L0750: 5, | | |
| | | | | | | Pro-151 to Cys-158, | H0618: 4, L0789: 4, | | |
| | | | | | | Pro-125 to Cys-132, | | | |
| | | | | | | Gln-134 to Arg-139, | | | |
| | | | | | | Pro-141 to Gly-162, | | | |
| | | | | | | Lys-212 to Ser-220, | | | |
| | | | | | | Ser-283 to Ser-288. | | | |
| 241 | HNFCS26 | 899406 | 251 | 2-994 | 671 | Cys-40 to Asn-46, | AR054: 17, AR051: 12, | | |
| | | | | | | Gln-283 to Trp-291, | AR050: 9, AR061: 4, | | |
| | | | | | | Ser-298 to Tyr-305, | AR089: 1 | | |
| | | | | | | Leu-307 to Gly-320, | H0271: 6, H0556: 5, | | |
| | | | | | | Gln-326 to Tyr-331. | L0748: 5, L0803: 4, | | |
| | | | | | | | H0411: 3, H0586: 3, | | |
| | | | | | | | H0036: 3, L0666: 3, | | |
| | | | | | | | H0222: 2, S0212: 2, | | |
| | | | | | | | H0075: 2, H0575: 2, | | |
| | | | | | | | H0046: 2, H0071: 2, | | |
| | | | | | | | S0003: 2, H0615: 2, | | |
| | | | | | | | L0483: 2, H0623: 2, | | |
| | | | | | | | H0494: 2, L0659: 2, | | |
| | | | | | | | L0565: 2, S0380: 2, | | |
| | | | | | | | H0521: 2, L0740: 2, | | |
| | | | | | | | L0731: 2, S0194: 2, | | |
| | | | | | | | H0265: 1, S0418: 1, | | |
| | | | | | | | H0580: 1, H0587: 1, | | |
| | | | | | | | H0069: 1, H0427: 1, | | |
| | | | | | | | H0599: 1, H0004: 1, | | |
| | | | | | | | H0581: 1, T0115: 1, | | |
| | | | | | | | H0024: 1, S0362: 1, | | |
| | | | | | | | H0355: 1, H0375: 1, | | |
| | | | | | | | H0266: 1, H0687: 1, | | |
| | | | | | | | H0028: 1, S0250: 1, | | |
| | | | | | | | H0252: 1, H0328: 1, | | |
| | | | | | | | L0055: 1, H0212: 1, | | |
| | | | | | | | H0598: 1, H0056: 1, | | |
| | | | | | | | H0132: 1, H0647: 1, | | |
| | | | | | | | S0142: 1, H0529: 1, | | |
| | | | | | | | L0369: 1, L0372: 1, | | |
| | | | | | | | L0646: 1, L0773: 1, | | |
| | | | | | | | L0774: 1, L0607: 1, | | |
| | | | | | | | L0515: 1, L0788: 1, | | |
| | | | | | | | L0665: 1, H0144: 1, | | |
| | | | | | | | H0702: 1, S0126: 1, | | |
| | | | | | | | H0689: 1, H0690: 1, | | |
| | | | | | | | H0684: 1, H0435: 1, | | |
| | | | | | | | S0328: 1, S0378: 1, | | |
| | | | | | | | H0478: 1, H0626: 1, | | |
| | | | | | | | S3012: 1, S0027: 1, | | |
| | | | | | | | S0028: 1, S0206: 1, | | |
| | | | | | | | L0608: 1, S0192: 1 and | | |
| | | | | | | | H0543: 1. | | |
| | | 956682 | 422 | 2-421 | 842 | Cys-42 to Asn-48, | | | |
| | | | | | | Arg-77 to Ser-87. | | | |
| | | 956683 | 423 | 160-414 | 843 | Arg-1 to Glu-8. | | | |
| | | 956684 | 424 | 2239-1151 | 844 | Asp-15 to Gln-22, | | | |
| | | | | | | Gln-42 to Lys-50, | | | |
| | | | | | | Thr-61 to Gly-74, | | | |
| | | | | | | Asn-86 to Pro-93, | | | |
| | | | | | | Ser-124 to Leu-152, | | | |
| | | | | | | Thr-171 to Ile-177, | | | |
| | | | | | | Leu-197 to Lys-203, | | | |
| | | | | | | Asn-222 to Thr-229, | | | |
| | | | | | | Gly-249 to Pro-254. | | | |
| 242 | HWLXT48 | 957630 | 252 | 55-363 | 672 | | AR089: 12, AR061: 9 | | |
| | | | | | | | S0360: 2, H0550: 2, | | |
| | | | | | | | S0028: 2, H0543: 2, | | |
| | | | | | | | H0663: 1, H0638: 1, | | |
| | | | | | | | S0376: 1, H0580: 1, | | |
| | | | | | | | S0045: 1, H0393: 1, | | |
| | | | | | | | H0370: 1, H0392: 1, | | |
| | | | | | | | H0156: 1, H0618: 1, | | |
| | | | | | | | H0318: 1, H0135: 1, | | |
| | | | | | | | T0042: 1, H0366: 1, | | |
| | | | | | | | S0002: 1, L0803: 1, | | |
| | | | | | | | L0791: 1, S0126: 1, | | |
| | | | | | | | S0037: 1, S0027: 1, | | |
| | | | | | | | S0032: 1, L0741: 1, | | |
| | | | | | | | L0754: 1, H0445: 1, | | |
| | | | | | | | L0596: 1, S0026: 1 and | | |
| | | | | | | | H0542: 1. | | |
| 243 | HBCPT10 | 957631 | 253 | 260-838 | 673 | | AR061: 2, AR089: 2, | | |
| | | | | | | | S0360: 2, H0550: 2, | | |
| | | | | | | | S0028: 2, H0543: 2, | | |
| | | | | | | | H0663: 1, H0638: 1, | | |
| | | | | | | | S0376: 1, H0580: 1, | | |
| | | | | | | | S0045: 1, H0393: 1, | | |
| | | | | | | | H0370: 1, H0392: 1, | | |
| | | | | | | | H0156: 1, H0618: 1, | | |
| | | | | | | | H0318: 1, H0135: 1, | | |
| | | | | | | | T0042: 1, H0366: 1, | | |
| | | | | | | | S0002: 1, L0803: 1, | | |
| | | | | | | | L0791: 1, S0126: 1, | | |
| | | | | | | | S0037: 1, S0027: 1, | | |
| | | | | | | | S0032: 1, L0741: 1, | | |
| | | | | | | | L0754: 1, H0445: 1, | | |
| | | | | | | | L0596: 1, S0026: 1 and | | |
| | | | | | | | H0542: 1. | | |
| 244 | HETKR83 | 963274 | 254 | 2-445 | 674 | His-2 to Cys-15, | AR089: 2, AR061: 2 | | |
| | | | | | | Lys-46 to Lys-56, | H0046: 44, H0135: 11, | | |
| | | | | | | Ser-61 to Cys-74, | H0539: 10, L0455: 7, | | |
| | | | | | | Gly-87 to Tyr-110, | S0010: 3, L0456: 3, | | |
| | | | | | | Gln-127 to Tyr-146. | L0750: 3, L0663: 2, | | |
| | | | | | | | L0746: 2, L0717: 2, | | |
| | | | | | | | L0779: 2, L0777: 2, | | |
| | | | | | | | H0624: 1, S0116: 1, | | |
| | | | | | | | H0208: 1, L0717: 1, | | |
| | | | | | | | H0549: 1, H0333: 1, | | |
| | | | | | | | H0013: 1, S0346: 1, | | |
| | | | | | | | L0157: 1, T0006: 1, | | |
| | | | | | | | H0652: 1, L0666: 1, | | |
| | | | | | | | H0144: 1, S0328: 1, | | |
| | | | | | | | H0696: 1 and L0439: 1. | | |
| 245 | HEBGK01 | 1229764 | 255 | 1-819 | 675 | Asn-1 to Gly-10. | AR061: 0, AR089: 0 | | |
| | | | | | | | H0617: 7, H0483: 1, | | |
| | | | | | | | S0007: 1, S0051: 1, | | |
| | | | | | | | H0182: 1, H0606: 1, | | |
| | | | | | | | L0769: 1, L0761: 1 and | | |
| | | | | | | | H0547: 1. | | |
| | | 963673 | 425 | 453-109 | 845 | Gly-48 to Gly-54. | | | |
| 246 | HAPBS07 | 967325 | 256 | 1-315 | 676 | Glu-44 to Pro-49. | AR061: 5, AR089: 2 | | |
| | | | | | | | S0003: 4, S0344: 3, | | |
| | | | | | | | S0278: 2, S0358: 1, | | |
| | | | | | | | H0042: 1, H0575: 1, | | |
| | | | | | | | S0010: 1, H0373: 1, | | |
| | | | | | | | S0003: 1, H0163: 1, | | |
| | | | | | | | H0038: 1, H0616: 1, | | |
| | | | | | | | H0264: 1, H0100: 1, | | |
| | | | | | | | S0144: 1 and H0521: 1. | | |
| 247 | HWLPR94 | 967326 | 257 | 184-459 | 677 | Thr-29 to Gly-34, | AR089: 18, AR061: 3 | | |
| | | | | | | Glu-53 to Leu-58, | L0766: 4, L0666: 3, | | |
| | | | | | | Thr-66 to Thr-74. | S0278: 2, L0758: 2, | | |
| | | | | | | | S0358: 1, S0376: 1, | | |
| | | | | | | | S0010: 1, H0050: 1, | | |
| | | | | | | | S0003: 1, H0038: 1, | | |
| | | | | | | | H0616: 1, H0264: 1, | | |
| | | | | | | | H0100: 1, S0448: 1, | | |
| | | | | | | | S0344: 1, S0002: 1, | | |
| | | | | | | | S0426: 1, L0642: 1, | | |
| | | | | | | | L0659: 1, S0374: 1, | | |
| | | | | | | | H0521: 1 and : 1. | | |
| 248 | HE6GK65 | 1128005 | 258 | 3-1106 | 678 | Ser-55 to Gly-60, | AR054: 8, AR051: 18, | | |
| | | | | | | Leu-78 to Cys-87, | AR061: 4, AR050: 3, | | |
| | | | | | | Pro-186 to Gly-191, | AR089: 2 | | |
| | | | | | | His-225 to Val-233, | L0771: 2, H0295: 1, | | |
| | | | | | | Pro-238 to Phe-245, | S0418: 1, S0045: 1, | | |
| | | | | | | Arg-272 to Pro-289, | H0392: 1, H0497: 1, | | |
| | | | | | | Thr-303 to Ala-312, | H0618: 1, H0457: 1, | | |
| | | | | | | Pro-323 to Gly-330. | H0103: 1, H0617: 1, | | |
| | | | | | | | H0100: 1, L0761: 1, | | |
| | | | | | | | L0803: 1, L0805: 1, | | |
| | | | | | | | L0657: 1, L0791: 1, | | |
| | | | | | | | L0666: 1, H0520: 1, | | |
| | | | | | | | H0547: 1, H0519: 1, | | |
| | | | | | | | L0758: 1 and L0593: 1. | | |
| | | 969661 | 426 | 1-1071 | 846 | Ser-53 to Gly-58, | | | |
| | | | | | | Leu-76 to Cys-85, | | | |
| | | | | | | Leu-93 to Gln-98. | | | |
| 249 | HSPOI67 | 971184 | 259 | 1-1983 | 679 | Asp-4 to Gln-11, | AR054: 10, AR061: 6, | | |
| | | | | | | Gln-31 to Lys-39, | AR051: 3, AR050: 3, | | |
| | | | | | | Thr-50 to Gly-63, | AR089: 1 | | |
| | | | | | | Asn-75 to Pro-82, | L0768: 3, H0670: 3, | | |
| | | | | | | Ser-113 to Leu-141, | L0731: 3, L0759: 3, | | |
| | | | | | | Thr-160 to Ile-166, | S0192: 3, H0657: 2, | | |
| | | | | | | Leu-186 to Lys-192, | H0013: 2, H0271: 2, | | |
| | | | | | | Asn-211 to Thr-218, | S0003: 2, L0766: 2, | | |
| | | | | | | Glu-265 to Asp-270, | L0666: 2, L0747: 2, | | |
| | | | | | | Lys-317 to Gly-329, | L0749: 2, L0752: 2, | | |
| | | | | | | Gln-613 to Trp-621, | H0686: 1, S0114: 1, | | |
| | | | | | | Ser-628 to Tyr-635, | S0356: 1, S0358: 1, | | |
| | | | | | | Leu-637 to Gly-650, | S0360: 1, H0580: 1, | | |
| | | | | | | Gln-656 to Tyr-661. | S0132: 1, H0331: 1, | | |
| | | | | | | | L0021: 1, H0042: 1, | | |
| | | | | | | | H0575: 1, H0050: 1, | | |
| | | | | | | | H0024: 1, H0355: 1, | | |
| | | | | | | | H0375: 1, H0059: 1, | | |
| | | | | | | | H0633: 1, S0142: 1, | | |
| | | | | | | | S0210: 1, L0770: 1, | | |
| | | | | | | | L0667: 1, L0662: 1, | | |
| | | | | | | | L0804: 1, L0775: 1, | | |
| | | | | | | | L0776: 1, L0661: 1, | | |
| | | | | | | | L0809: 1, S0374: 1, | | |
| | | | | | | | H0519: 1, S0126: 1, | | |
| | | | | | | | H0660: 1, H0521: 1, | | |
| | | | | | | | S0044: 1, H0576: 1, | | |
| | | | | | | | L0748: 1, L0756: 1, | | |
| | | | | | | | L0596: 1, L0590: 1, | | |
| | | | | | | | L0592: 2, L0601: 1 and | | |
| | | | | | | | S0242: 1. | | |
| 250 | HE8NI05 | 1217155 | 260 | 73-1533 | 680 | | AR051: 25, AR054: 9, | | |
| | | | | | | | AR050: 3, AR061: 3, | | |
| | | | | | | | AR089: 1 | | |
| | | | | | | | L0666: 3, L0776: 2, | | |
| | | | | | | | L0750: 2, S0222: 1, | | |
| | | | | | | | H0497: 1, H0013: 1, | | |
| | | | | | | | H0009: 1, S0214: 1, | | |
| | | | | | | | H0124: 1, H0090: 1, | | |
| | | | | | | | L0792: 1, H0547: 1, | | |
| | | | | | | | H0519: 1, H0659: 1, | | |
| | | | | | | | L0777: 1, L0758: 1, | | |
| | | | | | | | L0589: 1 and L0608: 1. | | |
| | | 971303 | 427 | 73-609 | 847 | | | | |
| 251 | HHENW06 | 971310 | 261 | 687-1271 | 681 | | AR050: 83, AR051: 81, | | |
| | | | | | | | AR054: 70, AR089: 1, | | |
| | | | | | | | AR061: 0 | | |
| | | | | | | | H0549: 7, L0665: 6, | | |
| | | | | | | | L0751: 6, L0439: 5, | | |
| | | | | | | | H0620: 3, L0803: 3, | | |
| | | | | | | | L0777: 3, L0601: 3, | | |
| | | | | | | | H0483: 2, H0486: 2, | | |
| | | | | | | | H0309: 2, L0774: 2, | | |
| | | | | | | | L0657: 2, L0659: 2, | | |
| | | | | | | | L0809: 2, L0666: 2, | | |
| | | | | | | | L0438: 2, H0520: 2, | | |
| | | | | | | | H0658: 2, L0602: 2, | | |
| | | | | | | | H0555: 2, H0624: 1, | | |
| | | | | | | | H0686: 1, H0295: 1, | | |
| | | | | | | | H0656: 1, S0282: 1, | | |
| | | | | | | | H0255: 1, S0354: 1, | | |
| | | | | | | | H0580: 1, H0619: 1, | | |
| | | | | | | | H0618: 1, H0581: 1, | | |
| | | | | | | | S0049: 1, H0052: 1, | | |
| | | | | | | | H0562: 1, H0012: 1, | | |
| | | | | | | | H0083: 1, H0687: 1, | | |
| | | | | | | | S0250: 1, H0428: 1, | | |
| | | | | | | | L0483: 1, H0135: 1, | | |
| | | | | | | | S0038: 1, H0494: 1, | | |
| | | | | | | | L0640: 1, L0638: 1, | | |
| | | | | | | | L0637: 1, L0771: 1, | | |
| | | | | | | | L0662: 1, L0805: 1, | | |
| | | | | | | | L0665: 1, L0629: 1, | | |
| | | | | | | | L0368: 1, L0789: 1, | | |
| | | | | | | | L0663: 1, H0519: 1, | | |
| | | | | | | | H0593: 1, H0682: 1, | | |
| | | | | | | | H0670: 1, H0521: 1, | | |
| | | | | | | | H0522: 1, H0696: 1, | | |
| | | | | | | | L0740: 1, L0779: 1 and | | |
| | | | | | | | H0067: 1. | | |
| 252 | HNTAV78 | 971315 | 262 | 3-266 | 682 | Glu-52 to Leu-58, | AR054: 10, AR089: 2, | | |
| | | | | | | Arg-63 to Lys-71, | AR061: 1, AR051: 1, | | |
| | | | | | | Arg-83 to Val-88. | AR050: 1 | | |
| | | | | | | | H0305: 1, H0580: 1, | | |
| | | | | | | | H0428: 1, L0803: 1, | | |
| | | | | | | | L0809: 1 and H0519: 1. | | |
| 253 | HMVCP64 | 1027019 | 263 | 1-624 | 683 | Cys-14 to Gly-20, | AR061: 67, AR054: 54, | | |
| | | | | | | Glu-31 to Asn-38, | AR050: 51, AR051: 45, | | |
| | | | | | | Asn-50 to Arg-55, | AR089: 27 | | |
| | | | | | | Arg-79 to Pro-84, | L0748: 3, L0779: 3, | | |
| | | | | | | Glu-91 to Arg-98, | L0590: 3, H0046: 2, | | |
| | | | | | | Ala-104 to Leu-109, | H0050: 2, H0031: 2, | | |
| | | | | | | Lys-114 to Asn-119, | L0731: 2, S0040: 1, | | |
| | | | | | | Asp-132 to Gln-137, | S0212: 1, H0661: 1, | | |
| | | | | | | Tyr-180 to Glu-186. | S0418: 1, S0046: 1, | | |
| | | | | | | | H0645: 1, H0393: 1, | | |
| | | | | | | | H0013: 1, H0156: 1, | | |
| | | | | | | | H0575: 1, T0010: 1, | | |
| | | | | | | | H0266: 1, H0428: 1, | | |
| | | | | | | | H0163: 1, H0413: 1, | | |
| | | | | | | | S0002: 1, L0764: 1, | | |
| | | | | | | | L0766: 1, L0805: 1, | | |
| | | | | | | | L0776: 1, L0790: 1, | | |
| | | | | | | | H0144: 1, S0028: 1, | | |
| | | | | | | | L0740: 1, L0747: 1, | | |
| | | | | | | | L0749: 1, S0192: 1 and | | |
| | | | | | | | S0276: 1. | | |
| | | 971620 | 428 | 363-1034 | 848 | Arg-11 to Arg-18, | | | |
| | | | | | | Cys-30 to Gly-36, | | | |
| | | | | | | Glu-47 to Asn-54, | | | |
| | | | | | | Asn-66 to Arg-71, | | | |
| | | | | | | Arg-95 to Pro-100, | | | |
| | | | | | | Glu-107 to Arg-114, | | | |
| | | | | | | Lys-130 to Asn-135, | | | |
| | | | | | | Asp-148 to Gln-153. | | | |
| 254 | HE8UT58 | 973153 | 264 | 3-662 | 684 | | AR089: 8, AR061: 7 | | |
| | | | | | | | L0439: 4, L0751: 4, | | |
| | | | | | | | L0805: 3, H0674: 2, | | |
| | | | | | | | L0518: 2, L0809: 2, | | |
| | | | | | | | L0758: 2, H0661: 1, | | |
| | | | | | | | L0619: 1, S0358: 1, | | |
| | | | | | | | H0013: 1, H0156: 1, | | |
| | | | | | | | H0390: 1, H0544: 1, | | |
| | | | | | | | H0570: 1, S0051: 1, | | |
| | | | | | | | T0006: 1, H0032: 1, | | |
| | | | | | | | H0673: 1, S0036: 1, | | |
| | | | | | | | L0769: 1, L0800: 1, | | |
| | | | | | | | L0794: 1, L0803: 1, | | |
| | | | | | | | L0661: 1, L0636: 1, | | |
| | | | | | | | L0529: 1, L0543: 1, | | |
| | | | | | | | L0665: 1, H0521: 1, | | |
| | | | | | | | H0696: 1, H0694: 1, | | |
| | | | | | | | L0747: 1, L0779: 1, | | |
| | | | | | | | L0777: 1, L0752: 1 and | | |
| | | | | | | | H0352: 1. | | |
| 255 | HDPBI30 | 974711 | 265 | 182-1312 | 685 | Asp-1 to Asn-10. | AR051: 3, AR050: 1, | | |
| | | | | | | | AR089: 1, AR061: 0 | | |
| | | | | | | | H0521: 3, H0656: 2, | | |
| | | | | | | | H0635: 2, H0549: 1, | | |
| | | | | | | | H0050: 1, H0413: 1, | | |
| | | | | | | | H0641: 1, L0387: 1, | | |
| | | | | | | | H0436: 1 and H0423: 1. | | |
| 256 | HNECM88 | 1128027 | 266 | 2-754 | 686 | Leu-11 to Arg-18, | AR089: 6, AR061: 5 | | |
| | | | | | | Asp-46 to Ser-53, | L0749: 5, L0769: 3, | | |
| | | | | | | Pro-59 to Thr-66, | L0747: 3, L0758: 3, | | |
| | | | | | | Asp-134 to Ala-139, | S0376: 2, H0635: 2, | | |
| | | | | | | Leu-150 to Met-157. | H0596: 2, L0775: 2, | | |
| | | | | | | | L0657: 2, L0666: 2, | | |
| | | | | | | | L0748: 2, L0731: 2, | | |
| | | | | | | | L0591: 2, L0608: 2, | | |
| | | | | | | | S0040: 1, S0358: 1, | | |
| | | | | | | | S0410: 1, L0021: 1, | | |
| | | | | | | | H0457: 1, H0179: 1, | | |
| | | | | | | | H0271: 1, H0553: 1, | | |
| | | | | | | | H0674: 1, H0090: 1, | | |
| | | | | | | | H0038: 1, H0412: 1, | | |
| | | | | | | | H0059: 1, L0762: 1, | | |
| | | | | | | | L0770: 1, L0796: 1, | | |
| | | | | | | | L0761: 1, L0764: 1, | | |
| | | | | | | | L0662: 1, L0767: 1, | | |
| | | | | | | | L0649: 1, L0804: 1, | | |
| | | | | | | | L0650: 1, L0806: 1, | | |
| | | | | | | | L0606: 1, L0783: 1, | | |
| | | | | | | | L0809: 1, L0665: 1, | | |
| | | | | | | | S0053: 1, H0659: 1, | | |
| | | | | | | | S0330: 1, L0602: 1, | | |
| | | | | | | | H0694: 1, S3014: 1, | | |
| | | | | | | | S0028: 1, L0740: 1, | | |
| | | | | | | | L0754: 1, L0756: 1, | | |
| | | | | | | | L0752: 1 and L0588: 1. | | |
| | | 974717 | 429 | 1-489 | 849 | Leu-9 to Arg-16, | | | |
| | | | | | | Asp-44 to Ser-51, | | | |
| | | | | | | Pro-57 to Thr-64. | | | |
| 257 | HFXJI27 | 971046 | 267 | 173-367 | 687 | Pro-48 to Leu-53. | AR089: 10, AR061: 7 | | |
| | | | | | | | L0754: 21, H0553: 10, | | |
| | | | | | | | H0574: 6, L0771: 5, | | |
| | | | | | | | L0598: 4, L0659: 4, | | |
| | | | | | | | L0663: 4, L0745: 4, | | |
| | | | | | | | L0731: 4, L0599: 4, | | |
| | | | | | | | S0414: 3, H0328: 3, | | |
| | | | | | | | L0776: 3, L0439: 3, | | |
| | | | | | | | L0756: 3, H0624: 2, | | |
| | | | | | | | S0358: 2, S0376: 2, | | |
| | | | | | | | S0444: 2, L0717: 2, | | |
| | | | | | | | H0596: 2, H0687: 2, | | |
| | | | | | | | H0615: 2, L0646: 2, | | |
| | | | | | | | L0662: 2, L0803: 2, | | |
| | | | | | | | L0774: 2, L0438: 2, | | |
| | | | | | | | H0670: 2, S0330: 2, | | |
| | | | | | | | H0478: 2, L0779: 2, | | |
| | | | | | | | L0777: 2, L0755: 2, | | |
| | | | | | | | S0260: 2, S0452: 2, | | |
| | | | | | | | H0171: 1, S0402: 1, | | |
| | | | | | | | H0583: 1, H0650: 1, | | |
| | | | | | | | H0341: 1, S0282: 1, | | |
| | | | | | | | H0638: 1, S0360: 1, | | |
| | | | | | | | S0132: 1, H0497: 1, | | |
| | | | | | | | H0632: 1, H0156: 1, | | |
| | | | | | | | H0575: 1, L0105: 1, | | |
| | | | | | | | H0052: 1, H0251: 1, | | |
| | | | | | | | H0545: 1, L0471: 1, | | |
| | | | | | | | H0012: 1, H0051: 1, | | |
| | | | | | | | H0510: 1, S0003: 1, | | |
| | | | | | | | S0214: 1, H0622: 1, | | |
| | | | | | | | H0124: 1, H0090: 1, | | |
| | | | | | | | H0591: 1, H0038: 1, | | |
| | | | | | | | H0616: 1, H0551: 1, | | |
| | | | | | | | T0067: 1, H0413: 1, | | |
| | | | | | | | L0065: 1, S0422: 1, | | |
| | | | | | | | UNKWN: 1, L0649: 1, | | |
| | | | | | | | L0378: 1, L0655: 1, | | |
| | | | | | | | L0517: 1, L0783: 1, | | |
| | | | | | | | L0666: 1, L0664: 1, | | |
| | | | | | | | L0665: 1, H0144: 1, | | |
| | | | | | | | S0374: 1, H0520: 1, | | |
| | | | | | | | H0519: 1, S0126: 1, | | |
| | | | | | | | H0684: 1, H0658: 1, | | |
| | | | | | | | H0666: 1, H0521: 1, | | |
| | | | | | | | L0746: 1, L0750: 1, | | |
| | | | | | | | L0786: 1, L0591: 1, | | |
| | | | | | | | L0485: 1, L0593: 1, | | |
| | | | | | | | S0026: 1, S0192: 1, | | |
| | | | | | | | S0242: 1, H0677: 1 and | | |
| | | | | | | | H0506: 1. | | |
| | | 975381 | 430 | 3-599 | 850 | His-1 to Thr-8, | | | |
| | | | | | | Val-11 to Tyr-20, | | | |
| | | | | | | Lys-89 to Arg-105, | | | |
| | | | | | | Gln-124 to His-131, | | | |
| | | | | | | Gln-147 to Ser-170. | | | |

[0040] The first column in Table 1A provides the gene number in the application corresponding to the clone identifier. The second column in Table 1A provides a unique “Clone ID NO:Z” for a cDNA clone related to each contig sequence disclosed in Table 1A. This clone ID references the cDNA clone which contains at least the 5′ most sequence of the assembled contig and at least a portion of SEQ ID NO:X was determined by directly sequencing the referenced clone. The reference clone may have more sequence than described in the sequence listing or the clone may have less. In the vast majority of cases, however, the clone is believed to encode a full-length polypeptide. In the case where a clone is not full-length, a full-length cDNA can be obtained by methods described elsewhere herein.

[0041] The third column in Table 1A provides a unique “Contig ID” identification for each contig sequence. The fourth column provides the “SEQ ID NO:” identifier for each of the contig polynucleotide sequences disclosed in Table 1A. The fifth column, “ORF (From-To)”, provides the location (i.e., nucleotide position numbers) within the polynucleotide sequence “SEQ ID NO:X” that delineate the preferred open reading frame (ORF) shown in the sequence listing and referenced in Table 1A, column 6, as SEQ ID NO:Y. Where the nucleotide position number “To” is lower than the nucleotide position number “From”, the preferred ORF is the reverse complement of the referenced polynucleotide sequence.

[0042] The sixth column in Table 1A provides the corresponding SEQ ID NO:Y for the polypeptide sequence encoded by the preferred ORF delineated in column 5. In one embodiment, the invention provides an amino acid sequence comprising, or alternatively consisting of, a polypeptide encoded by the portion of SEQ ID NO:X delineated by “ORF (From-To)”. Also provided are polynucleotides encoding such amino acid sequences and the complementary strand thereto.

[0043] Column 7 in Table 1A lists residues comprising epitopes contained in the polypeptides encoded by the preferred ORF (SEQ ID NO:Y), as predicted using the algorithm of Jameson and Wolf, (1988) Comp. Appl. Biosci. 4:181-186. The Jameson-Wolf antigenic analysis was performed using the computer program PROTEAN (Version 3.11 for the Power MacIntosh, DNASTAR, Inc., 1228 South Park Street Madison, Wis.). In specific embodiments, polypeptides of the invention comprise, or alternatively consist of, at least one, two, three, four, five or more of the predicted epitopes as described in Table 1A. It will be appreciated that depending on the analytical criteria used to predict antigenic determinants, the exact address of the determinant may vary slightly.

[0044] Column 8 in Table 1A provides an expression profile and library code: count for each of the contig sequences (SEQ ID NO:X) disclosed in Table 1A, which can routinely be combined with the information provided in Table 4 and used to determine the tissues, cells, and/or cell line libraries which predominantly express the polynucleotides of the invention. The first number in column 8 (preceding the colon), represents the tissue/cell source identifier code corresponding to the code and description provided in Table 4. For those identifier codes in which the first two letters are not “AR”, the second number in column 8 (following the colon) represents the number of times a sequence corresponding to the reference polynucleotide sequence was identified in the tissue/cell source. Those tissue/cell source identifier codes in which the first two letters are “AR” designate information generated using DNA array technology. Utilizing this technology, cDNAs were amplified by PCR and then transferred, in duplicate, onto the array. Gene expression was assayed through hybridization of first strand cDNA probes to the DNA array. cDNA probes were generated from total RNA extracted from a variety of different tissues and cell lines. Probe synthesis was performed in the presence of ³³P dCTP, using oligo(dT) to prime reverse transcription. After hybridization, high stringency washing conditions were employed to remove non-specific hybrids from the array. The remaining signal, emanating from each gene target, was measured using a Phosphorimager. Gene expression was reported as Phosphor Stimulating Luminescence (PSL) which reflects the level of phosphor signal generated from the probe hybridized to each of the gene targets represented on the array. A local background signal subtraction was performed before the total signal generated from each array was used to normalize gene expression between the different hybridizations. The value presented after “[array code]:” represents the mean of the duplicate values, following background subtraction and probe normalization. One of skill in the art could routinely use this information to identify normal and/or diseased tissue(s) which show a predominant expression pattern of the corresponding polynucleotide of the invention or to identify polynucleotides which show predominant and/or specific tissue and/or cell expression.

[0045] Column 9 in Table 1A provides a chromosomal map location for certain polynucleotides of the invention. Chromosomal location was determined by finding exact matches to EST and cDNA sequences contained in the NCBI (National Center for Biotechnology Information) UniGene database. Each sequence in the UniGene database is assigned to a “cluster”; all of the ESTs, cDNAs, and STSs in a cluster are believed to be derived from a single gene. Chromosomal mapping data is often available for one or more sequence(s) in a UniGene cluster; this data (if consistent) is then applied to the cluster as a whole. Thus, it is possible to infer the chromosomal location of a new polynucleotide sequence by determining its identity with a mapped UniGene cluster.

[0046] A modified version of the computer program BLASTN (Altshul et al., J. Mol. Biol. 215:403-410 (1990); and Gish and States, Nat. Genet. 3:266-272 (1993)) was used to search the UniGene database for EST or cDNA sequences that contain exact or near-exact matches to a polynucleotide sequence of the invention (the ‘Query’). A sequence from the UniGene database (the ‘Subject’) was said to be an exact match if it contained a segment of 50 nucleotides in length such that 48 of those nucleotides were in the same order as found in the Query sequence. If all of the matches that met this criteria were in the same UniGene cluster, and mapping data was available for this cluster, it is indicated in Table 1A under the heading “Cytologic Band”. Where a cluster had been further localized to a distinct cytologic band, that band is disclosed; where no banding information was available, but the gene had been localized to a single chromosome, the chromosome is disclosed.

[0047] Once a presumptive chromosomal location was determined for a polynucleotide of the invention, an associated disease locus was identified by comparison with a database of diseases which have been experimentally associated with genetic loci. The database used was the Morbid Map, derived from OMIM™ (supra). If the putative chromosomal location of a polynucleotide of the invention (Query sequence) was associated with a disease in the Morbid Map database, an OMIM reference identification number was noted in column 10, Table 1A, labelled “OMIM Disease Reference(s)”. Table 5 is a key to the OMIM reference identification numbers (column 1), and provides a description of the associated disease in Column 2.

TABLE 1B

| Clone ID | SEQ ID | CONTIG | BAC ID: | SEQ ID | EXON |
|---|---|---|---|---|---|
| NO: Z | NO: X | ID: | A | NO: B | From-To |
| HMSKF13 | 31 | 708207 | AC023891 | 851 | 1-32 |
| | | | | | 159-474 |
| | | | | | 659-1496 |
| | | | | | 2796-2957 |
| | | | | | 3160-3603 |
| | | | | | 5493-5676 |
| | | | | | 8391-8506 |
| | | | | | 8716-8880 |
| | | | | | 8891-9116 |
| | | | | | 9977-10703 |
| | | | | | 11326-12477 |
| HMSKF13 | 31 | 708207 | AC023891 | 852 | 1-169 |
| HLHCT68 | 36 | 764745 | AC010344 | 853 | 1-121 |
| | | | | | 2985-3815 |
| | | | | | 4282-4423 |
| HLHCT68 | 36 | 764745 | AC008496 | 854 | 1-96 |
| | | | | | 2321-2645 |
| | | | | | 5406-5532 |
| | | | | | 5545-5688 |
| | | | | | 6055-6205 |
| | | | | | 9065-9895 |
| | | | | | 10362-10503 |
| HLHCT68 | 36 | 764745 | AC010344 | 855 | 1-144 |
| HLHCT68 | 36 | 764745 | AC010344 | 856 | 1-2396 |
| HLHCT68 | 36 | 764745 | AC008496 | 857 | 1-1684 |
| HNHEQ86 | 39 | 785580 | AC024653 | 858 | 1-731 |
| HTOIA82 | 43 | 844319 | AC012446 | 859 | 1-410 |
| HTOIA82 | 43 | 844319 | AC012446 | 860 | 1-329 |
| HEOPE58 | 45 | 851009 | AL078634 | 861 | 1-40 |
| | | | | | 1089-1226 |
| | | | | | 3206-3637 |
| | | | | | 4312-4463 |
| | | | | | 7455-8330 |
| | | | | | 8603-8815 |
| | | | | | 9078-9190 |
| | | | | | 9522-9767 |
| | | | | | 10946-12260 |
| | | | | | 13754-14357 |
| | | | | | 15092-15830 |
| | | | | | 18660-18822 |
| | | | | | 21128-21635 |
| | | | | | 21685-21721 |
| HEOPE58 | 45 | 851009 | AL078634 | 862 | 1-235 |
| | | | | | 3051-3154 |
| | | | | | 3199-3734 |
| HEOPE58 | 45 | 851009 | AL078634 | 863 | 1-444 |
| HSSJM44 | 51 | 871067 | AC026352 | 864 | 1-2314 |
| HSSJM44 | 51 | 871067 | AC068755 | 865 | 1-2311 |
| HSSJM44 | 51 | 871067 | AC069443 | 866 | 1-2314 |
| HSSJM44 | 51 | 871067 | AC026352 | 867 | 1-430 |
| HSSJM44 | 51 | 871067 | AC068755 | 868 | 1-430 |
| HSSJM44 | 51 | 871067 | AC069443 | 869 | 1-430 |
| HCFLI54 | 59 | 921382 | AC023278 | 870 | 1-1977 |
| | | | | | 2006-3504 |
| | | | | | 3802-4090 |
| | | | | | 4113-6041 |
| | | | | | 6143-6242 |
| | | | | | 6252-6919 |
| | | | | | 6933-7614 |
| | | | | | 7682-8351 |
| HCFLI54 | 59 | 921382 | AC005562 | 871 | 1-3490 |
| | | | | | 3783-4087 |
| | | | | | 4094-6238 |
| | | | | | 6249-6901 |
| | | | | | 6930-7364 |
| | | | | | 7701-8350 |
| HCFLI54 | 59 | 921382 | AC023278 | 872 | 1-574 |
| | | | | | 774-1443 |
| HCFLI54 | 59 | 921382 | AC023278 | 873 | 1-616 |
| HCFLI54 | 59 | 921382 | AC005562 | 874 | 1-667 |
| HLMDO95 | 62 | 928344 | AC020641 | 875 | 1-591 |
| | | | | | 627-2046 |
| HDPSJ02 | 66 | 943316 | AL109804 | 876 | 1-161 |
| | | | | | 684-1524 |
| | | | | | 1611-1868 |
| | | | | | 2185-2484 |
| | | | | | 2550-3044 |
| | | | | | 3158-3539 |
| | | | | | 4120-4422 |
| | | | | | 4682-4784 |
| | | | | | 5155-5227 |
| | | | | | 5763-7414 |
| HDPSJ02 | 66 | 943316 | AL109804 | 877 | 1-442 |
| HDPSJ02 | 66 | 943316 | AL109804 | 878 | 1-86 |
| | | | | | 393-695 |
| | | | | | 2345-2611 |
| | | | | | 2985-3904 |
| | | | | | 4603-5446 |
| | | | | | 5467-5608 |
| | | | | | 6481-6582 |
| | | | | | 6976-7234 |
| | | | | | 7899-8638 |
| | | | | | 9094-9354 |
| | | | | | 9548-10236 |
| HBGQN46 | 67 | 945370 | AF038458 | 879 | 1-630 |
| | | | | | 1311-1416 |
| | | | | | 2481-4022 |
| | | | | | 4952-5252 |
| | | | | | 6370-6479 |
| | | | | | 7623-8269 |
| HRODF07 | 69 | 952426 | AC023402 | 880 | 1-336 |
| HRODF07 | 69 | 952426 | AC011597 | 881 | 1-336 |
| HEGAO83 | 87 | 780837 | AC024009 | 882 | 1-880 |
| | | | | | 1967-2289 |
| | | | | | 2746-2890 |
| | | | | | 3236-3284 |
| HEGAO83 | 87 | 780837 | AC040991 | 883 | 1-880 |
| | | | | | 1967-2288 |
| | | | | | 2745-2889 |
| | | | | | 3235-3283 |
| HEGAO83 | 87 | 780837 | AC040991 | 884 | 1-176 |
| HHFCI36 | 99 | 844285 | AC073582 | 885 | 1-348 |
| HHFCI36 | 99 | 844285 | AC011307 | 886 | 1-738 |
| | | | | | 777-928 |
| | | | | | 6547-8986 |
| | | | | | 9041-9656 |
| HHFCI36 | 99 | 844285 | AC011302 | 887 | 1-167 |
| | | | | | 5786-8225 |
| | | | | | 8280-8895 |
| HHFCI36 | 99 | 844285 | AC004616 | 888 | 1-890 |
| | | | | | 1656-2025 |
| | | | | | 6359-9765 |
| HHFCI36 | 99 | 844285 | AC073582 | 889 | 1-1884 |
| HHFCI36 | 99 | 844285 | AC011307 | 890 | 1-5863 |
| | | | | | 8965-9695 |
| | | | | | 9824-11213 |
| | | | | | 11438-11774 |
| | | | | | 12992-13348 |
| | | | | | 14833-14982 |
| | | | | | 18797-19148 |
| | | | | | 19635-20733 |
| | | | | | 20793-23092 |
| | | | | | 23268-23517 |
| | | | | | 23704-25018 |
| | | | | | 25022-25395 |
| HHFCI36 | 99 | 844285 | AC011302 | 891 | 1-602 |
| HHFCI36 | 99 | 844285 | AC011302 | 892 | 1-5861 |
| | | | | | 8963-9683 |
| | | | | | 9822-11211 |
| | | | | | 11436-11772 |
| | | | | | 12990-13346 |
| | | | | | 14831-14980 |
| | | | | | 18796-19146 |
| | | | | | 19633-20731 |
| | | | | | 20802-23090 |
| | | | | | 23266-23515 |
| | | | | | 23772-25006 |
| | | | | | 25020-25393 |
| HACCH94 | 101 | 847143 | AL161458 | 893 | 1-1140 |
| HACCH94 | 101 | 847143 | AL161458 | 894 | 1-90 |
| | | | | | 5811-6312 |
| HDPND85 | 104 | 852628 | AC003042 | 895 | 1-261 |
| | | | | | 1877-2339 |
| | | | | | 3059-3286 |
| | | | | | 3970-4326 |
| | | | | | 4931-5114 |
| | | | | | 6268-6359 |
| | | | | | 7022-7866 |
| | | | | | 7877-8140 |
| | | | | | 8262-8911 |
| HDPND85 | 104 | 852628 | AC003042 | 896 | 1-754 |
| HMKCH92 | 126 | 910936 | AC034192 | 903 | 1-52 |
| | | | | | 416-535 |
| | | | | | 1184-1338 |
| | | | | | 1500-1651 |
| | | | | | 4583-4659 |
| | | | | | 10526-10754 |
| | | | | | 10871-10957 |
| HMKCH92 | 126 | 910936 | AC022381 | 904 | 1-52 |
| | | | | | 416-535 |
| | | | | | 1184-1340 |
| | | | | | 1502-1651 |
| | | | | | 4583-4651 |
| | | | | | 10520-10756 |
| | | | | | 10873-10990 |
| | | | | | 13187-13217 |
| HMKCH92 | 126 | 910936 | AC026206 | 905 | 1-107 |
| HMKCH92 | 126 | 910936 | AC022381 | 906 | 1-107 |
| HBGMZ39 | 151 | 947112 | AC008537 | 907 | 1-1186 |
| HBGMZ39 | 151 | 947112 | AC019337 | 908 | 1-1182 |
| HBGMZ39 | 151 | 947112 | AC008537 | 909 | 1-1993 |
| | | | | | 2105-2385 |
| | | | | | 2736-3068 |
| | | | | | 4364-4489 |
| | | | | | 6546-6781 |
| | | | | | 7025-8165 |
| HBGMZ39 | 151 | 947112 | AC019337 | 910 | 1-1991 |
| | | | | | 2103-2383 |
| | | | | | 2734-3066 |
| | | | | | 4360-4485 |
| | | | | | 6541-6776 |
| | | | | | 7021-8159 |
| HBGMZ39 | 151 | 947112 | AC008537 | 911 | 1-734 |
| | | | | | 767-1001 |
| HBGMZ39 | 151 | 947112 | AC019337 | 912 | 1-158 |
| | | | | | 291-565 |
| | | | | | 598-832 |
| HSDJM56 | 159 | 948669 | AC009524 | 913 | 1-541 |
| HNTND64 | 171 | 954871 | AC025090 | 914 | 1-465 |
| HNTND64 | 171 | 954871 | AC025090 | 915 | 1-454 |
| HMTAV95 | 197 | 614936 | AL137000 | 916 | 1-47 |
| | | | | | 321-642 |
| | | | | | 2386-2508 |
| | | | | | 3316-3493 |
| | | | | | 4104-4572 |
| | | | | | 6015-6340 |
| | | | | | 6520-6573 |
| HMTAV95 | 197 | 614936 | AL137000 | 917 | 1-539 |
| HMTAV95 | 197 | 614936 | AL137000 | 918 | 1-510 |
| HHFGP83 | 202 | 828162 | AC026348 | 919 | 1-62 |
| | | | | | 528-1080 |
| | | | | | 1104-1284 |
| | | | | | 1836-1940 |
| | | | | | 2308-2633 |
| HHFGP83 | 202 | 828162 | AC026329 | 920 | 1-102 |
| | | | | | 461-611 |
| | | | | | 3520-3678 |
| | | | | | 4094-4203 |
| | | | | | 4670-5222 |
| | | | | | 5246-5426 |
| | | | | | 5978-6082 |
| | | | | | 6450-6775 |
| | | | | | 8830-9053 |
| | | | | | 9755-10066 |
| | | | | | 10098-10279 |
| | | | | | 10355-10988 |
| | | | | | 12072-13795 |
| HE9TK49 | 205 | 856343 | AC021491 | 921 | 1-138 |
| | | | | | 546-642 |
| | | | | | 2717-2876 |
| | | | | | 3393-3695 |
| | | | | | 3838-4513 |
| HE9TK49 | 205 | 856343 | AC004590 | 922 | 1-138 |
| | | | | | 546-642 |
| | | | | | 2735-2894 |
| | | | | | 3411-3713 |
| | | | | | 3856-4531 |
| HFKJO15 | 215 | 910828 | AC005500 | 923 | 1-180 |
| | | | | | 288-509 |
| | | | | | 638-770 |
| | | | | | 1363-1466 |
| | | | | | 1541-1661 |
| | | | | | 1829-1971 |
| | | | | | 1988-2162 |
| | | | | | 3576-3797 |
| | | | | | 4349-4491 |
| | | | | | 4913-6610 |
| HFKJO15 | 215 | 910828 | AC007731 | 924 | 1-180 |
| | | | | | 288-509 |
| | | | | | 638-770 |
| | | | | | 1363-1466 |
| | | | | | 1541-1661 |
| | | | | | 1829-1971 |
| | | | | | 1988-2162 |
| | | | | | 3576-3797 |
| | | | | | 4349-4491 |
| | | | | | 4913-6610 |
| HFKJO15 | 215 | 910828 | AC005500 | 925 | 1-97 |
| | | | | | 305-602 |
| HFKJO15 | 215 | 910828 | AC007731 | 926 | 1-97 |
| | | | | | 305-602 |
| HCQCI06 | 220 | 915000 | AC068763 | 927 | 1-590 |
| | | | | | 819-1083 |
| HCQCI06 | 220 | 915000 | AC069223 | 928 | 1-362 |
| HCQCI06 | 220 | 915000 | AC068763 | 929 | 1-593 |
| HWMEV63 | 225 | 931154 | AC078816 | 930 | 1-1574 |
| HFKKE19 | 239 | 947418 | AL356389 | 931 | 1-721 |
| HFKKE19 | 239 | 947418 | AL157901 | 932 | 1-721 |
| HHFME38 | 243 | 947970 | AC011307 | 933 | 1-738 |
| | | | | | 777-928 |
| | | | | | 6547-8986 |
| | | | | | 9041-9656 |
| HHFME38 | 243 | 947970 | AC011302 | 934 | 1-602 |
| HHFME38 | 243 | 947970 | AC004616 | 935 | 1-890 |
| | | | | | 1656-2025 |
| | | | | | 6359-9765 |
| HHFME38 | 243 | 947970 | AC011307 | 936 | 1-5863 |
| | | | | | 8965-9695 |
| | | | | | 9824-11213 |
| | | | | | 11438-11774 |
| | | | | | 12992-13348 |
| | | | | | 14833-14982 |
| | | | | | 18797-19148 |
| | | | | | 19635-20733 |
| | | | | | 20793-23092 |
| | | | | | 23268-23517 |
| | | | | | 23704-25018 |
| | | | | | 25022-25395 |
| HHFME38 | 243 | 947970 | AC011302 | 937 | 1-167 |
| | | | | | 5786-8225 |
| | | | | | 8280-8895 |
| HETKR83 | 254 | 963274 | AC044883 | 938 | 1-637 |
| HE8UT58 | 264 | 973153 | AC032004 | 939 | 1-120 |

[0048] Table 1B summarizes additional polynucleotides encompassed by the invention (including cDNA clones related to the sequences (Clone ID NO:Z), contig sequences (contig identifier (Contig ID:) contig nucleotide sequence identifiers (SEQ ID NO:X)), and genomic sequences (SEQ ID NO:B). The first column provides a unique clone identifier, “Clone ID NO:Z”, for a cDNA clone related to each contig sequence. The second column provides the sequence identifier, “SEQ ID NO:X”, for each contig sequence. The third column provides a unique contig identifier, “Contig ID:” for each contig sequence. The fourth column, provides a BAC identifier “BAC ID NO:A” for the BAC clone referenced in the corresponding row of the table. The fifth column provides the nucleotide sequence identifier, “SEQ ID NO:B” for a fragment of the BAC clone identified in column four of the corresponding row of the table. The sixth column, “Exon From-To”, provides the location (i.e., nucleotide position numbers) within the polynucleotide sequence of SEQ ID NO:B which delineate certain polynucleotides of the invention that are also exemplary members of polynucleotide sequences that encode polypeptides of the invention (e.g., polypeptides containing amino acid sequences encoded by the polynucleotide sequences delineated in column six, and fragments and variants thereof).

| | | SEQ | | | | Score/ | | |
|---|---|---|---|---|---|---|---|---|
| Clone ID | Contig | ID | Analysis | | PFam/NR Accession | Percent | | |
| NO:Z | ID: | NO:X | Method | PFam/NR Description | Number | Identity | NT From | NT To |
| HNHAM52 | 457010 | 268 | HMMER | PFAM: Zinc-binding | PF00099 | 3.5 | 72 | 89 |
| | | | 1.8 | metalloprotease domain | | | | |
| HMMAB49 | 462502 | 269 | HMMER | PFAM: Zinc-binding | PF00099 | 3.49 | 166 | 183 |
| | | | 1.8 | metalloprotease domain | | | | |
| HRDBT72 | 507847 | 270 | HMMER | PFAM: Zinc-binding | PF00099 | 7.31 | 295 | 324 |
| | | | 1.8 | metalloprotease domain | | | | |
| HE2FR50 | 1127466 | 14 | blastx.14 | (AF129534) F-box protein | gi\|6164618\|gb\|AAF04 | 90% | 109 | 369 |
| | | | | Fbx4 [Homo sapiens] | 468.1\|AF129534_1 | | | |
| HE2FR50 | 508498 | 271 | HMMER | PFAM: Zinc-binding | PF00099 | 3.68 | 137 | 166 |
| | | | 1.8 | metalloprotease domain | | | | |
| | | | blastx.2 | hypothetical protein | pir\|T50613\|T50613 | 79% | 122 | 355 |
| | | | | DKFZp547N213.1 - | | | | |
| | | | | human (fragment) | | | | |
| HLHDR39 | 523499 | 272 | HMMER | PFAM: IG | PF00047 | 4.05 | 370 | 420 |
| | | | 1.8 | (immunoglobulin) | | | | |
| | | | | superfamily | | | | |
| HSIDS82 | 531248 | 273 | HMMER | PFAM: Zinc-binding | PF00099 | 5.91 | 206 | 238 |
| | | | 1.8 | metalloprotease domain | | | | |
| HSICX21 | 531267 | 274 | HMMER | PFAM: Zinc-binding | PF00099 | 3.8 | 307 | 336 |
| | | | 1.8 | metalloprotease domain | | | | |
| HCDAJ15 | 557243 | 275 | HMMER | PFAM: Zinc-binding | PF00099 | 3.61 | 68 | 88 |
| | | | 1.8 | metalloprotease domain | | | | |
| HSNAH21 | 571314 | 276 | HMMER | PFAM: Zinc-binding | PF00099 | 7.14 | 91 | 135 |
| | | | 1.8 | metalloprotease domain | | | | |
| HBZSH19 | 578224 | 277 | HMMER | PFAM: IG | PF00047 | 4.23 | 68 | 199 |
| | | | 1.8 | (immunoglobulin) | | | | |
| | | | | superfamily | | | | |
| HWBCQ57 | 590758 | 278 | HMMER | PFAM: Class II | PF00993 | 43.3 | 294 | 368 |
| | | | 2.1.1 | histocompatibility antigen, | | | | |
| | | | | alpha domain | | | | |
| | | | blastx | DC class II | emb\|CAA25141.1\| | 100% | 40 | 288 |
| | | | | histocompatibility antigen | | 92% | 276 | 545 |
| | | | | alpha-chain [Homo | | 100% | 545 | 580 |
| | | | | sapiens] | | | | |
| HCFAT05 | 592118 | 22 | HMMER | PFAM: Ion transport | PF00520 | 106.1 | 137 | 361 |
| | | | 2.1.1 | protein | | | | |
| | | | blastx.2 | potassium channel protein | gb\|AAA59457.1\| | 67% | 134 | 427 |
| | | | | [Homo sapiens] | | 100% | 18 | 137 |
| | | | | | | 52% | 360 | 491 |
| HMWIN49 | 1195465 | 23 | blastx.14 | CG8810 PROTEIN. | sp\|Q9V6E7\|Q9V6E7 | 58% | 257 | 406 |
| | | | | | | 52% | 102 | 152 |
| HMWIN49 | 615238 | 279 | HMMER | PFAM: BolA-like protein | PF01722 | 66.8 | 133 | 273 |
| | | | 2.1.1 | | | | | |
| HOECV83 | 653276 | 280 | HMMER | PFAM: Zinc-binding | PF00099 | 4.67 | 360 | 389 |
| | | | 1.8 | metalloprotease domain | | | | |
| HWACV74 | 662347 | 281 | HMMER | PFAM: Zinc-binding | PF00099 | 4.43 | 198 | 242 |
| | | | 1.8 | metalloprotease domain | | | | |
| HCHMV63 | 666798 | 282 | HMMER | PFAM: Zinc-binding | PF00099 | 5.78 | 86 | 133 |
| | | | 1.8 | metalloprotease domain | | | | |
| HCWKB72 | 676007 | 283 | HMMER | PFAM: Zinc-binding | PF00099 | 4.93 | 134 | 175 |
| | | | 1.8 | metalloprotease domain | | | | |
| HFPCT53 | 678892 | 284 | HMMER | PFAM: Kazal-type serine | PF00050 | 6.45 | 295 | 342 |
| | | | 1.8 | protease inhibitor domain | | | | |
| HDTBW62 | 1222829 | 29 | blastx.14 | CG10191 PROTEIN. | sp\|Q9VU65\|Q9VU65 | 46% | 131 | 1030 |
| | | | | | | 27% | 557 | 1039 |
| HDTBW62 | 681324 | 285 | HMMER | PFAM: IG | PF00047 | 4.25 | 78 | 155 |
| | | | 1.8 | (immunoglobulin) | | | | |
| | | | | superfamily | | | | |
| HEFMB30 | 691516 | 286 | HMMER | PFAM: Zinc-binding | PF00099 | 4.57 | 144 | 185 |
| | | | 1.8 | metalloprotease domain | | | | |
| HMSKF13 | 708207 | 31 | HMMER | PFAM: Fibronectin type | PF00041 | 10.64 | 98 | 193 |
| | | | 1.8 | III domain | | | | |
| HAHDI40 | 710790 | 32 | HMMER | PFAM: IG | PF00047 | 12.66 | 522 | 593 |
| | | | 1.8 | (immunoglobulin) | | | | |
| | | | | superfamily | | | | |
| | | | blastx.2 | 165K myofibrillar M-band | pir\|A44027\|A44027 | 47% | 204 | 653 |
| | | | | structural protein - | 48% | 2 | 199 | |
| | | | | chicken | | 33% | 8 | 106 |
| HAPOR59 | 712955 | 287 | HMMER | PFAM: Zinc-binding | PF00099 | 6.42 | 102 | 146 |
| | | | 1.8 | metalloprotease domain | | | | |
| | | | blastx.2 | CG5336 PROTEIN. | sp\|Q9VKB2\|Q9VKB | 40% | 3 | 347 |
| | | | | | 2 | | | |
| HFCAG94 | 735763 | 288 | HMMER | PFAM: Zinc-binding | PF00099 | 3.92 | 100 | 129 |
| | | | 1.8 | metalloprotease domain | | | | |
| HSPAB58 | 736098 | 289 | HMMER | PFAM: Zinc-binding | PF00099 | 4.6 | 39 | 86 |
| | | | 1.8 | metalloprotease domain | | | | |
| HLHCT68 | 764745 | 36 | HMMER | PFAM: Fibronectin type | PF00041 | 16.02 | 65 | 136 |
| | | | 1.8 | III domain | | | | |
| HBIBF78 | 772797 | 290 | HMMER | PFAM: Zinc-binding | PF00099 | 3.63 | 60 | 101 |
| | | | 1.8 | metalloprotease domain | | | | |
| HLJDQ79 | 774667 | 291 | HMMER | PFAM: IG | PF00047 | 3.5 | 182 | 265 |
| | | | 1.8 | (immunoglobulin) | | | | |
| | | | | superfamily | | | | |
| HNHEQ86 | 785580 | 39 | HMMER | PFAM: Zinc-binding | PF00099 | 3.9 | 7 | 48 |
| | | | 1.8 | metalloprotease domain | | | | |
| HWAAE95 | 789051 | 292 | HMMER | PFAM: EGF-like domain | PF00008 | 14.74 | 108 | 176 |
| | | | 1.8 | | | | | |
| HLMAC70 | 795928 | 293 | HMMER | PFAM: IG | PF00047 | 3.67 | 187 | 246 |
| | | | 1.8 | (immunoglobulin) | | | | |
| | | | | superfamily | | | | |
| HTLAQ18 | 811792 | 42 | HMMER | PFAM: Fibronectin type | PF00041 | 31.34 | 56 | 331 |
| | | | 1.8 | III domain | | | | |
| | | | blastx.2 | hypothetical protein | pir\|T42656\|T42656 | 96% | 11 | 457 |
| | | | | DKFZp434H2215.1 - | | | | |
| | | | | human | | | | |
| HTOIA82 | 844319 | 43 | HMMER | PFAM: Zinc-binding | PF00099 | 4.25 | 50 | 82 |
| | | | 1.8 | metalloprotease domain | | | | |
| HUVHP54 | 1199609 | 44 | blastx.14 | Hypothetical 34.2 kDa | sp\|AAG12612\|AAG1 | 40% | 408 | 527 |
| | | | | protein. | 2612 | 34% | 726 | 881 |
| | | | | | | 50% | 651 | 698 |
| | | | | | | 20% | 531 | 662 |
| | | | | | | 46% | 891 | 935 |
| | | | | | | 50% | 69 | 122 |
| HUVHP54 | 849278 | 294 | HMMER | PFAM: Dienelactone | PF01738 | 80.3 | 354 | 1001 |
| | | | 2.1.1 | hydrolase family | | | | |
| | | | blastx.2 | Hypothetical 34.2 kDa | sp\|AAG12612\|AAG1 | 31% | 330 | 1001 |
| | | | | protein. | 2612 | | | |
| HEOPE58 | 851009 | 45 | HMMER | PFAM: Zinc-binding | PF00099 | 5.32 | 320 | 364 |
| | | | 1.8 | metalloprotease domain | | | | |
| HE8AE26 | 851514 | 295 | HMMER | PFAM: Zinc-binding | PF00099 | 5.8 | 49 | 75 |
| | | | 1.8 | metalloprotease domain | | | | |
| HHFOO84 | 857780 | 47 | HMMER | PFAM: Zinc-binding | PF00099 | 4.21 | 141 | 161 |
| | | | 1.8 | metalloprotease domain | | | | |
| HNHHF46 | 859822 | 296 | HMMER | PFAM: Zinc-binding | PF00099 | 5.55 | 3 | 35 |
| | | | 1.8 | metalloprotease domain | | | | |
| HISAM68 | 1129136 | 49 | blastx.14 | (AK000363) unnamed | gi\|7020399\|dbj\|BAA9 | 100% | 245 | 481 |
| | | | | protein product [Homo | 1112.1\| | | | |
| | | | | sapiens] | | | | |
| HISAM68 | 868785 | 297 | HMMER | PFAM: Zinc-binding | PF00099 | 3.48 | 178 | 198 |
| | | | 1.8 | metalloprotease domain | | | | |
| HEQAY32 | 869178 | 50 | HMMER | PFAM: Fibronectin type | PF00041 | 12.25 | 736 | 867 |
| | | | 1.8 | III domain | | | | |
| HSSJM44 | 871067 | 51 | HMMER | PFAM: Fibronectin type | PF00041 | 8.5 | 694 | 936 |
| | | | 1.8 | III domain | | | | |
| HCWDL45 | 889416 | 298 | HMMER | PFAM: Zinc-binding | PF00099 | 4.63 | 121 | 168 |
| | | | 1.8 | metalloprotease domain | | | | |
| HTNBM01 | 910705 | 53 | HMMER | PFAM: EGF-like domain | PF00008 | 18.51 | 232 | 339 |
| | | | 1.8 | | | | | |
| | | | blastx.2 | Low density lipoprotein | sp\|AAF70379\|AAF70 | 96% | 7 | 366 |
| | | | | receptor related protein - | 379 | 30% | 7 | 342 |
| | | | | deleted 1 | | 31% | 34 | 342 |
| | | | | | | 100% | 577 | 651 |
| | | | | | | 23% | 1 | 342 |
| | | | | | | 30% | 342 | 575 |
| | | | | | | 35% | 46 | 255 |
| | | | | | | 36% | 46 | 243 |
| | | | | | | 27% | 46 | 324 |
| | | | | | | 28% | 46 | 279 |
| | | | | | | 30% | 46 | 249 |
| | | | | | | 27% | 19 | 273 |
| | | | | | | 28% | 76 | 246 |
| | | | | | | 31% | 46 | 234 |
| | | | | | | 31% | 13 | 117 |
| | | | | | | 31% | 202 | 363 |
| | | | | | | 22% | 19 | 264 |
| | | | | | | 40% | 43 | 138 |
| | | | | | | 31% | 166 | 306 |
| | | | | | | 31% | 37 | 246 |
| | | | | | | 25% | 79 | 312 |
| | | | | | | 30% | 175 | 264 |
| | | | | | | 27% | 31 | 171 |
| | | | | | | 41% | 55 | 105 |
| | | | | | | 32% | 46 | 129 |
| | | | | | | 26% | 16 | 141 |
| HAHEF22 | 910996 | 54 | HMMER | PFAM: Fibronectin type | PF00041 | 146.8 | 396 | 656 |
| | | | 2.1.1 | III domain | | | | |
| | | | blastx.2 | M-PROTEIN. | sp\|O55124\|O55124 | 43% | 3 | 803 |
| | | | | | | 28% | 3 | 779 |
| | | | | | | 25% | 90 | 683 |
| | | | | | | 40% | 396 | 686 |
| | | | | | | 29% | 306 | 686 |
| | | | | | | 31% | 3 | 365 |
| HOSFZ73 | 913876 | 299 | HMMER | PFAM: Zinc-binding | PF00099 | 4.29 | 335 | 355 |
| | | | 1.8 | metalloprotease domain | | | | |
| HDPTQ41 | 1189814 | 56 | blastx.14 | (AL132880) predicted | gi\|6434373\|emb\|CAB | 36% | 204 | 422 |
| | | | | using Genefinder; | 60875.1\| | | | |
| | | | | preliminary 1 | | | | |
| HDPTQ41 | 913933 | 300 | HMMER | PFAM: BolA-like protein | PF01722 | 48.5 | 176 | 388 |
| | | | 2.1.1 | | | | | |
| HDPXN01 | 915919 | 301 | HMMER | PFAM: Zinc-binding | PF00099 | 4.29 | 99 | 146 |
| | | | 1.8 | metalloprotease domain | | | | |
| HCEOR02 | 921110 | 58 | HMMER | PFAM: Fibronectin type | PF00041 | 14.8 | 149 | 373 |
| | | | 1.8 | III domain | | | | |
| HCFLI54 | 921382 | 59 | HMMER | PFAM: Zinc-binding | PF00099 | 6.41 | 457 | 504 |
| | | | 1.8 | metalloprotease domain | | | | |
| HIBEV89 | 1112107 | 60 | blastx.14 | (AF137367) VPS10 | gi\|6692583\|gb\|AAF24 | 92% | 251 | 1102 |
| | | | | domain receptor protein | 748.1\|AF137367_1 | 98% | 1 | 273 |
| | | | | SORCS [Mus musculus] | | | | |
| HIBEV89 | 922757 | 302 | HMMER | PFAM: IG | PF00047 | 3.36 | 594 | 788 |
| | | | 1.8 | (immunoglobulin) | | | | |
| | | | | superfamily | | | | |
| | | | blastx.2 | (AF137367) VPS10 | gb\|AAF24748.1\|AF1 | 94% | 309 | 1103 |
| | | | | domain receptor protein | 37367_1 | 87% | 1 | 318 |
| | | | | SORCS [Mus musculus] | | 72% | 251 | 304 |
| HWLUL28 | 925331 | 61 | HMMER | PFAM: Alcohol/other | PF00106 | 113.24 | 163 | 588 |
| | | | 1.8 | dehydrogenases, short | | | | |
| | | | | chain type | | | | |
| | | | blastx.2 | C359F1.1 (novel protein | sp\|CAB92744\|CAB9 | 82% | 97 | 735 |
| | | | | (ortholog of mouse and rat | 2744 | | | |
| | | | | 1 | | | | |
| HLMDO95 | 928344 | 62 | HMMER | PFAM: 7 transmembrane | PF00001 | 43.25 | 220 | 369 |
| | | | 1.8 | receptor (rhodopsin | | | | |
| | | | | family) | | | | |
| | | | blastx.2 | Inflammation-related G | sp\|AAF91467\|AAF91 | 51% | 112 | 375 |
| | | | | protein-coupled receptor | 467 | 95% | 375 | 446 |
| | | | | EX33. | | | | |
| HCFCV92 | 934216 | 303 | HMMER | PFAM: Zinc-binding | PF00099 | 3.55 | 542 | 571 |
| | | | 1.8 | metalloprotease domain | | | | |
| HLHDD45 | 942901 | 304 | HMMER | PFAM: Zinc-binding | PF00099 | 5.88 | 177 | 218 |
| | | | 1.8 | metalloprotease domain | | | | |
| HHSGV13 | 943090 | 305 | HMMER | PFAM: Immunoglobulin | PF00047 | 22.8 | 145 | 384 |
| | | | 2.1.1 | domain | | | | |
| | | | blastx.2 | unnamed protein product | emb\|CAB42187.1\| | 100% | 7 | 105 |
| | | | | [unidentified] | | | | |
| HDPSJ02 | 943316 | 66 | HMMER | PFAM: Immunoglobulin | PF00047 | 54.3 | 521 | 724 |
| | | | 2.1.1 | domain | | | | |
| HBGQN46 | 945370 | 67 | HMMER | PFAM: Fibronectin type | PF00041 | 11 | 171 | 314 |
| | | | 1.8 | III domain | | | | |
| HE2SN25 | 948687 | 306 | HMMER | PFAM: Zinc-binding | PF00099 | 9.04 | 227 | 268 |
| | | | 1.8 | metalloprotease domain | | | | |
| HRODF07 | 952426 | 69 | HMMER | PFAM: Fibronectin type | PF00041 | 16.63 | 82 | 192 |
| | | | 1.8 | III domain | | | | |
| HE8BQ58 | 954449 | 307 | HMMER | PFAM: IG | PF00047 | 4.19 | 90 | 158 |
| | | | 1.8 | (immunoglobulin) | | | | |
| | | | | superfamily | | | | |
| HNHCI32 | 861673 | 71 | HMMER | PFAM: 7 transmembrane | PF00001 | 133.17 | 195 | 545 |
| | | | 1.8 | receptor (rhodopsin | | | | |
| | | | | family) | | | | |
| | | | blastx.2 | G protein-coupled | sp\|AAF27279\|AAF27 | 100% | 189 | 551 |
| | | | | receptor 57. | 279 | 100% | 112 | 186 |
| | | | | | | 100% | 56 | 112 |
| HNHCI32 | 956105 | 308 | HMMER | PFAM: 7 transmembrane | PF00001 | 133.17 | 951 | 601 |
| | | | 1.8 | receptor (rhodopsin | | | | |
| | | | | family) | | | | |
| | | | blastx.2 | (AF112461) G protein- | gb\|AAF27279.1\|AF1 | 100% | 555 | 917 |
| | | | | coupled receptor 57 | 12461_1 | 100% | 478 | 552 |
| | | | | [Homo sapiens] | | 100% | 422 | 478 |
| HSQCM85 | 963554 | 309 | HMMER | PFAM: Zinc-binding | PF00099 | 5.37 | 187 | 231 |
| | | | 1.8 | metalloprotease domain | | | | |
| HPTVL90 | 509487 | 73 | HMMER | PFAM: short chain | PF00106 | 46.3 | 11 | 115 |
| | | | 2.1.1 | dehydrogenase | | | | |
| | | | blastx.2 | RETINAL SHORT- | sp\|Q9UKU3\|Q9UKU | 76% | 8 | 319 |
| | | | | CHAIN | 3 | | | |
| | | | | DEHYDROGENASE/RE | | | | |
| | | | | DUCTASE RETSDR3. | | | | |
| HRDFA94 | 1156347 | 74 | blastx.14 | sialoadhesin [Mus | gi\|2769750\|gb\|AAB9 | 67% | 190 | 1632 |
| | | | | musculus] | 5641.1\| | 78% | 2104 | 2367 |
| | | | | | | 62% | 1672 | 1893 |
| | | | | | | 69% | 10 | 198 |
| | | | | | | 40% | 1078 | 1422 |
| | | | | | | 53% | 1669 | 1881 |
| | | | | | | 35% | 742 | 1053 |
| | | | | | | 41% | 760 | 1050 |
| | | | | | | 36% | 742 | 1050 |
| | | | | | | 40% | 1072 | 1344 |
| | | | | | | 37% | 2110 | 2364 |
| | | | | | | 39% | 1093 | 1281 |
| | | | | | | 39% | 1669 | 1875 |
| | | | | | | 62% | 1851 | 1970 |
| | | | | | | 36% | 2116 | 2346 |
| | | | | | | 36% | 664 | 867 |
| | | | | | | 40% | 1102 | 1281 |
| | | | | | | 36% | 1693 | 1905 |
| | | | | | | 34% | 1672 | 1881 |
| | | | | | | 47% | 1669 | 1812 |
| | | | | | | 40% | 874 | 1056 |
| | | | | | | 36% | 1060 | 1230 |
| | | | | | | 51% | 2227 | 2355 |
| | | | | | | 50% | 2116 | 2235 |
| | | | | | | 40% | 889 | 1068 |
| | | | | | | 62% | 1558 | 1629 |
| | | | | | | 36% | 2227 | 2364 |
| | | | | | | 32% | 2218 | 2364 |
| | | | | | | 48% | 2104 | 2202 |
| | | | | | | 34% | 1288 | 1419 |
| | | | | | | 38% | 2251 | 2367 |
| | | | | | | 60% | 1558 | 1626 |
| | | | | | | 37% | 1102 | 1197 |
| | | | | | | 81% | 2063 | 2110 |
| | | | | | | 37% | 670 | 813 |
| | | | | | | 52% | 1558 | 1626 |
| | | | | | | 40% | 2107 | 2202 |
| | | | | | | 35% | 1690 | 1791 |
| | | | | | | 39% | 451 | 549 |
| | | | | | | 36% | 1309 | 1416 |
| | | | | | | 72% | 2010 | 2063 |
| | | | | | | 31% | 670 | 792 |
| | | | | | | 62% | 1447 | 1494 |
| | | | | | | 66% | 2290 | 2334 |
| | | | | | | 28% | 1309 | 1425 |
| | | | | | | 40% | 2110 | 2205 |
| | | | | | | 38% | 1881 | 1973 |
| | | | | | | 50% | 1558 | 1629 |
| | | | | | | 34% | 580 | 657 |
| | | | | | | 44% | 586 | 666 |
| | | | | | | 32% | 556 | 666 |
| | | | | | | 41% | 451 | 537 |
| | | | | | | 32% | 2245 | 2346 |
| | | | | | | 37% | 796 | 891 |
| | | | | | | 47% | 1558 | 1626 |
| | | | | | | 53% | 583 | 627 |
| | | | | | | 38% | 1393 | 1500 |
| | | | | | | 57% | 583 | 624 |
| | | | | | | 39% | 811 | 879 |
| | | | | | | 33% | 2245 | 2316 |
| | | | | | | 60% | 1447 | 1491 |
| | | | | | | 42% | 1735 | 1791 |
| | | | | | | 40% | 1911 | 1970 |
| | | | | | | 36% | 1735 | 1791 |
| | | | | | | 23% | 556 | 735 |
| | | | | | | 27% | 1884 | 1970 |
| | | | | | | 50% | 2063 | 2104 |
| | | | | | | 53% | 583 | 627 |
| | | | | | | 50% | 580 | 627 |
| | | | | | | 42% | 1447 | 1503 |
| | | | | | | 46% | 838 | 882 |
| | | | | | | 44% | 1514 | 1567 |
| | | | | | | 35% | 1846 | 1929 |
| | | | | | | 28% | 538 | 612 |
| | | | | | | 40% | 79 | 138 |
| | | | | | | 40% | 1222 | 1281 |
| | | | | | | 34% | 556 | 624 |
| | | | | | | 43% | 2084 | 2131 |
| | | | | | | 29% | 1905 | 1976 |
| | | | | | | 23% | 346 | 435 |
| | | | | | | 27% | 1803 | 1889 |
| | | | | | | 45% | 136 | 195 |
| | | | | | | 50% | 1114 | 1155 |
| | | | | | | 23% | 1750 | 1878 |
| | | | | | | 31% | 2245 | 2349 |
| HRDFA94 | 577352 | 310 | HMMER | PFAM: IG | PF00047 | 19.15 | 678 | 472 |
| | | | 1.8 | (immunoglobulin) | | | | |
| | | | | superfamily | | | | |
| | | | blastx | sialoadhesin [Mus | emb\|CAA85268.1\| | 78% | 720 | 421 |
| | | | | musculus] | | 35% | 705 | 442 |
| | | | | | | 51% | 561 | 433 |
| | | | | | | 39% | 720 | 553 |
| | | | | | | 36% | 561 | 424 |
| | | | | | | 37% | 735 | 583 |
| | | | | | | 47% | 687 | 586 |
| | | | | | | 38% | 537 | 421 |
| | | | | | | 46% | 723 | 685 |
| | | | | | | 70% | 736 | 707 |
| HRDFA94 | 937804 | 311 | HMMER | PFAM: Immunoglobulin | PF00047 | 140.4 | 451 | 609 |
| | | | 2.1.1 | domain | | | | |
| | | | blastx.2 | sialoadhesin [Mus | emb\|CAA85290.1\| | 71% | 10 | 1572 |
| | | | | musculus] | | 32% | 334 | 1572 |
| | | | | | | 36% | 580 | 1572 |
| | | | | | | 35% | 583 | 1572 |
| | | | | | | 35% | 583 | 1572 |
| | | | | | | 32% | 436 | 1512 |
| | | | | | | 31% | 451 | 1230 |
| | | | | | | 27% | 4 | 666 |
| HCE1S21 | 1010797 | 75 | blastx.14 | similar to the | gi\|1326367\|gb\|AAB0 | 67% | 128 | 238 |
| | | | | mitochondrial carrier | 0644.1\| | 39% | 185 | 337 |
| | | | | family [Caenorhabditis | | 40% | 9 | 113 |
| | | | | elegans] | | 43% | 434 | 502 |
| HCE1S21 | 671209 | 312 | HMMER | PFAM: Zinc-binding | PF00099 | 4.17 | 163 | 210 |
| | | | 1.8 | metalloprotease domain | | | | |
| | | | blastx.2 | hypothetical protein | pir\|T29225\|T29225 | 60% | 41 | 124 |
| | | | | F55G1.5 - Caenorhabditis | | 43% | 224 | 292 |
| | | | | elegans | | | | |
| HWHHW54 | 684125 | 76 | HMMER | PFAM: short chain | PF00106 | 59.1 | 871 | 1002 |
| | | | 2.1.1 | dehydrogenase | | | | |
| | | | blastx.2 | Oxidoreductase UCPA. | sp\|AAF80754\|AAF80 | 77% | 871 | 1059 |
| | | | | | 754 | | | |
| HDPGQ74 | 1223438 | 77 | blastx.14 | TTYH1. | sp\|AAG02580\|AAG0 | 46% | 12 | 500 |
| | | | | | 2580 | | | |
| HDPGQ74 | 691163 | 313 | HMMER | PFAM: Zinc-binding | PF00099 | 3.86 | 195 | 236 |
| | | | 1.8 | metalloprotease domain | | | | |
| | | | blastx.2 | TTYH1. | sp\|AAG02580\|AAG0 | 44% | 320 | 3 |
| | | | | | 2580 | | | |
| HTXGF27 | 695766 | 78 | HMMER | PFAM: short chain | PF00106 | 208.7 | 193 | 765 |
| | | | 2.1.1 | dehydrogenase | | | | |
| | | | blastx.2 | hypothetical protein | pir\|T17307\|T17307 | 93% | 70 | 1011 |
| | | | | DKFZp566O084.1 - | | 100% | 38 | 73 |
| | | | | human | | | | |
| HAPQW27 | 705518 | 314 | HMMER | PFAM: Sterol O- | PF01800 | 180.1 | 1 | 279 |
| | | | 2.1.1 | acyltransferase | | | | |
| | | | blastx.2 | AGRP1 PROTEIN. | sp\|O75907\|O75907 | 62% | 1 | 432 |
| HCUGR38 | 706471 | 80 | HMMER | PFAM: Alcohol/other | PF00106 | 73.02 | 102 | 284 |
| | | | 1.8 | dehydrogenases, short | | | | |
| | | | | chain type | | | | |
| | | | blastx.2 | Putative oxidoreductase. | sp\|CAB94622\|CAB9 | 55% | 105 | 296 |
| | | | | | 4622 | 30% | 4 | 81 |
| HCUGN19 | 716989 | 81 | HMMER | PFAM: Alcohol/other | PF00106 | 8.05 | 98 | 151 |
| | | | 1.8 | dehydrogenases, short | | | | |
| | | | | chain type | | | | |
| HDPTW90 | 722699 | 315 | HMMER | PFAM: IG | PF00047 | 3.32 | 1 | 24 |
| | | | 1.8 | (immunoglobulin) | | | | |
| | | | | superfamily | | | | |
| HPTGB43 | 726460 | 83 | HMMER | PFAM: short chain | PF00106 | 45.1 | 84 | 191 |
| | | | 2.1.1 | dehydrogenase | | | | |
| | | | blastx.2 | CARBONYL | sp\|Q9UHY9\|Q9UHY | 73% | 87 | 374 |
| | | | | REDUCTASE. | 9 | | | |
| HEONO59 | 741361 | 84 | HMMER | PFAM: Fibronectin type | PF00041 | 39.4 | 508 | 582 |
| | | | 2.1.1 | III domain | | | | |
| | | | blastx.2 | HOST CELL FACTOR 2. | sp\|Q9Y5Z7\|Q9Y5Z7 | 99% | 331 | 702 |
| | | | | | | 74% | 29 | 253 |
| | | | | | | 97% | 707 | 847 |
| HWBBR65 | 747723 | 316 | HMMER | PFAM: Zinc-binding | PF00099 | 4.15 | 185 | 205 |
| | | | 1.8 | metalloprotease domain | | | | |
| HFTCF28 | 778653 | 86 | HMMER | PFAM: Type I | PF01663 | 39 | 240 | 428 |
| | | | 2.1.1 | phosphodiesterase/ | | | | |
| | | | | nucleotide | | | | |
| | | | | pyrophosphatase | | | | |
| HEGAO83 | 780837 | 87 | HMMER | PFAM: IG | PF00047 | 9.4 | 234 | 305 |
| | | | 1.8 | (immunoglobulin) | | | | |
| | | | | superfamily | | | | |
| HPIAU71 | 1125171 | 88 | blastx.14 | (AE000331) ethanolamine | gi\|1788782\|gb\|AAC7 | 99% | 347 | 742 |
| | | | | ammonia-lyase, heavy | 5494.1\| | 38% | 169 | 231 |
| | | | | chain [Escherichia coli] | | | | |
| HPIAU71 | 786811 | 317 | HMMER | PFAM: Zinc-binding | PF00099 | 3.49 | 265 | 291 |
| | | | 1.8 | metalloprotease domain | | | | |
| HYABB43 | 1126356 | 89 | blastx.14 | alpha-2-macroglobulin | gi\|199086\|gb\|AAA39 | 82% | 253 | 47 |
| | | | | [Mus musculus] | 508.1\| | 66% | 878 | 807 |
| HYABB43 | 800006 | 318 | HMMER | PFAM: Alpha-2- | PF00207 | 90.9 | 206 | 27 |
| | | | 2.1.1 | macroglobulin family | | | | |
| | | | blastx.2 | alpha-2-macroglobulin | gb\|AAA39508.1\| | 67% | 263 | 36 |
| | | | | [Mus musculus] | | | | |
| HHPDX35 | 1182277 | 90 | blastx.14 | membrane glycoprotein | gi\|1545807\|dbj\|BAA1 | 64% | 13 | 1245 |
| | | | | [Mus musculus] | 1416.1\| | 65% | 1342 | 1506 |
| | | | | | | 44% | 28 | 216 |
| | | | | | | 36% | 19 | 213 |
| | | | | | | 37% | 4 | 213 |
| | | | | | | 31% | 4 | 213 |
| | | | | | | 42% | 79 | 213 |
| | | | | | | 28% | 1075 | 1254 |
| | | | | | | 38% | 4 | 144 |
| | | | | | | 30% | 46 | 213 |
| | | | | | | 34% | 118 | 213 |
| | | | | | | 35% | 4 | 120 |
| | | | | | | 32% | 40 | 150 |
| | | | | | | 25% | 1393 | 1521 |
| | | | | | | 35% | 1 | 102 |
| | | | | | | 38% | 2017 | 2079 |
| HHPDX35 | 810391 | 319 | HMMER | PFAM: IG | PF00047 | 9.26 | 6 | 209 |
| | | | 1.8 | (immunoglobulin) | | | | |
| | | | | superfamily | | | | |
| HHPDX35 | 948421 | 320 | HMMER | PFAM: Leucine rich | PF01463 | 41.6 | 210 | 356 |
| | | | 2.1.1 | repeat C-terminal domain | | | | |
| | | | blastx.2 | membrane glycoprotein | dbj\|BAA11416.1\| | 64% | 12 | 674 |
| | | | | [Mus musculus] | | | | |
| HHAMF38 | 810846 | 322 | HMMER | PFAM: WW domain | PF00397 | 80.7 | 169 | 258 |
| | | | 2.1.1 | | | | | |
| HFIJC31 | 828148 | 92 | HMMER | PFAM: Fibronectin type | PF00041 | 22.67 | 138 | 404 |
| | | | 1.8 | III domain | | | | |
| HNTRL43 | 835705 | 323 | HMMER | PFAM: IG | PF00047 | 11.38 | 266 | 319 |
| | | | 1.8 | (immunoglobulin) | | | | |
| | | | | superfamily | | | | |
| | | | blastx | hypothetical 119.5K | pir\|JQ0405\|JQ0405 | 52% | 301 | 357 |
| | | | | protein (uvrA region) - | 56% | 26 | 73 | |
| | | | | Micrococcus 1 | | 39% | 229 | 297 |
| | | | | | | 42% | 147 | 203 |
| | | | | | | 85% | 4 | 24 |
| | | | | | | 58% | 186 | 221 |
| | | | | | | 30% | 226 | 294 |
| HOFNC80 | 835718 | 324 | HMMER | PFAM: IG | PF00047 | 11.98 | 148 | 291 |
| | | | 1.8 | (immunoglobulin) | | | | |
| | | | | superfamily | | | | |
| | | | blastx | (AF111714) junctional | gb\|AAD42051.1\|AF1 | 71% | 28 | 303 |
| | | | | adhesion molecule [Bos | 11714_1 | 94% | 306 | 362 |
| | | | | taurus] | | 33% | 306 | 359 |
| HBJJX53 | 835733 | 325 | HMMER | PFAM: IG | PF00047 | 9.2 | 157 | 207 |
| | | | 1.8 | (immunoglobulin) | | | | |
| | | | | superfamily | | | | |
| | | | blastx.2 | (AF161081) activatory | gb\|AAD52965.1\|AF1 | 90% | 157 | 216 |
| | | | | receptor PIRIIbeta [Homo | 61081_1 | 73% | 215 | 283 |
| | | | | sapiens] | | | | |
| HNTBF75 | 836701 | 326 | HMMER | PFAM: short chain | PF00106 | 35.2 | 202 | 321 |
| | | | 2.1.1 | dehydrogenase | | | | |
| | | | blastx.2 | STEROID | sp\|Q9Y6G8\|Q9Y6G8 | 78% | 52 | 414 |
| | | | | DEHYDROGENASE | | | | |
| | | | | HOMOLOG. | | | | |
| HSKIA89 | 837986 | 97 | HMMER | PFAM: Alcohol/other | PF00106 | 17.7 | 359 | 478 |
| | | | 1.8 | dehydrogenases, short | | | | |
| | | | | chain type | | | | |
| | | | blastx.2 | hypothetical protein | pir\|T24832\|T24832 | 42% | 329 | 619 |
| | | | | T11F9.11 - | | 53% | 123 | 320 |
| | | | | Caenorhabditis elegans | | 35% | 737 | 820 |
| HHAME78 | 840939 | 98 | HMMER | PFAM: Alcohol/other | PF00106 | 55.01 | 60 | 260 |
| | | | 1.8 | dehydrogenases, short | | | | |
| | | | | chain type | | | | |
| | | | blastx.2 | CARBONYL | sp\|Q9UHY9\|Q9UHY | 83% | 48 | 260 |
| | | | | REDUCTASE. | 9 | 100% | 322 | 426 |
| | | | | | | 95% | 257 | 322 |
| | | | | | | 81% | 2 | 67 |
| HHFCI36 | 844285 | 99 | HMMER | PFAM: IG | PF00047 | 13.32 | 10 | 180 |
| | | | 1.8 | (immunoglobulin) | | | | |
| | | | | superfamily | | | | |
| | | | blastx.2 | (AL049946) hypothetical | emb\|CAB43220.1\| | 94% | 1 | 348 |
| | | | | protein [Homo sapiens] | 30% | 10 | 348 | |
| HDPXL24 | 1182266 | 100 | blastx.14 | sialoadhesin [Mus | gi\|557254\|emb\|CAA8 | 72% | 12 | 1166 |
| | | | | musculus] | 5290.1\| | 73% | 1242 | 1829 |
| | | | | | | 35% | 1326 | 1799 |
| | | | | | | 31% | 1317 | 1781 |
| | | | | | | 39% | 780 | 1079 |
| | | | | | | 30% | 729 | 1154 |
| | | | | | | 32% | 780 | 1154 |
| | | | | | | 38% | 1341 | 1634 |
| | | | | | | 44% | 18 | 227 |
| | | | | | | 32% | 3 | 314 |
| | | | | | | 40% | 558 | 773 |
| | | | | | | 39% | 381 | 593 |
| | | | | | | 44% | 384 | 551 |
| | | | | | | 43% | 1659 | 1790 |
| | | | | | | 41% | 1647 | 1805 |
| | | | | | | 33% | 387 | 599 |
| | | | | | | 40% | 1470 | 1652 |
| | | | | | | 25% | 522 | 749 |
| | | | | | | 30% | 879 | 1073 |
| | | | | | | 39% | 387 | 554 |
| | | | | | | 47% | 774 | 887 |
| | | | | | | 31% | 1602 | 1802 |
| | | | | | | 39% | 1164 | 1301 |
| | | | | | | 39% | 1461 | 1634 |
| | | | | | | 51% | 1683 | 1781 |
| | | | | | | 36% | 1155 | 1301 |
| | | | | | | 36% | 1155 | 1325 |
| | | | | | | 31% | 774 | 944 |
| | | | | | | 53% | 462 | 551 |
| | | | | | | 34% | 1335 | 1472 |
| | | | | | | 45% | 30 | 128 |
| | | | | | | 57% | 996 | 1073 |
| | | | | | | 40% | 555 | 695 |
| | | | | | | 69% | 1167 | 1235 |
| | | | | | | 42% | 195 | 314 |
| | | | | | | 42% | 15 | 128 |
| | | | | | | 53% | 1545 | 1640 |
| | | | | | | 33% | 171 | 314 |
| | | | | | | 30% | 1164 | 1301 |
| | | | | | | 39% | 567 | 665 |
| | | | | | | 37% | 186 | 281 |
| | | | | | | 44% | 861 | 941 |
| | | | | | | 57% | 1155 | 1211 |
| | | | | | | 34% | 303 | 452 |
| | | | | | | 45% | 1452 | 1517 |
| | | | | | | 34% | 570 | 683 |
| | | | | | | 39% | 60 | 128 |
| | | | | | | 26% | 1314 | 1439 |
| | | | | | | 33% | 687 | 776 |
| | | | | | | 48% | 1173 | 1247 |
| | | | | | | 39% | 165 | 233 |
| | | | | | | 30% | 807 | 932 |
| | | | | | | 37% | 1422 | 1493 |
| | | | | | | 50% | 87 | 128 |
| | | | | | | 47% | 1107 | 1169 |
| | | | | | | 36% | 609 | 665 |
| | | | | | | 36% | 1110 | 1166 |
| | | | | | | 63% | 2790 | 2822 |
| | | | | | | 36% | 609 | 665 |
| | | | | | | 38% | 1425 | 1487 |
| | | | | | | 45% | 545 | 604 |
| | | | | | | 46% | 606 | 644 |
| | | | | | | 36% | 855 | 911 |
| | | | | | | 39% | 1615 | 1683 |
| HDPXL24 | 846775 | 327 | HMMER | PFAM: Immunoglobulin | PF00047 | 30.8 | 204 | 350 |
| | | | 2.1.1 | domain | | | | |
| | | | blastx | sialoadhesin [Mus | emb\|CAA85268.1\| | 67% | 15 | 422 |
| | | | | musculus] | | 52% | 18 | 227 |
| | | | | | | 36% | 3 | 314 |
| | | | | | | 40% | 36 | 227 |
| | | | | | | 37% | 15 | 176 |
| | | | | | | 42% | 195 | 314 |
| | | | | | | 82% | 410 | 460 |
| | | | | | | 33% | 171 | 278 |
| | | | | | | 35% | 60 | 143 |
| | | | | | | 83% | 468 | 503 |
| | | | | | | 42% | 87 | 143 |
| | | | | | | 50% | 207 | 260 |
| | | | | | | 47% | 207 | 257 |
| HACCH94 | 847143 | 101 | HMMER | PFAM: 7 transmembrane | PF00001 | 167.94 | 10 | 735 |
| | | | 1.8 | receptor (rhodopsin | | | | |
| | | | | family) | | | | |
| | | | blastx.2 | ORPHAN G PROTEIN- | sp\|O95853\|O95853 | 99% | 7 | 879 |
| | | | | COUPLED RECEPTOR. | | | | |
| HTEOF80 | 847224 | 328 | HMMER | PFAM: EGF-like domain | PF00008 | 14.65 | 20 | 100 |
| | | | 1.8 | | | | | |
| | | | blastx.2 | Epidermal growth factor | sp\|AAF27812\|AAF27 | 96% | 11 | 106 |
| | | | | repeat containing protein. | 812 | | | |
| HTEED80 | 849075 | 103 | HMMER | PFAM: Fibronectin type | PF00041 | 12.84 | 521 | 808 |
| | | | 1.8 | III domain | | | | |
| | | | blastx.2 | CDNA FLJ10688 FIS, | sp\|BAA91751\|BAA9 | 99% | 254 | 850 |
| | | | | CLONE NT2RP3000320, | 1751 | 80% | 1 | 267 |
| | | | | HIGHLY SIMILAR TO 1 | | | | |
| | | | | 1 | | | | |
| HDPND85 | 852628 | 104 | HMMER | PFAM: Alcohol/other | PF00106 | 191.2 | 113 | 709 |
| | | | 1.8 | dehydrogenases, short | | | | |
| | | | | chain type | | | | |
| | | | blastx.2 | CG9360 PROTEIN. | sp\|Q9VYU9\|Q9VYU | 42% | 113 | 841 |
| | | | | | 9 | | | |
| HKABI68 | 856590 | 105 | HMMER | PFAM: Alcohol/other | PF00106 | 11.34 | 109 | 285 |
| | | | 1.8 | dehydrogenases, short | | | | |
| | | | | chain type | | | | |
| | | | blastx.2 | HSCARG. | sp\|AAG09721\|AAG0 | 99% | 139 | 441 |
| | | | | | 9721 | 75% | 456 | 551 |
| HWHPO29 | 857383 | 106 | HMMER | PFAM: short chain | PF00106 | 101.3 | 257 | 664 |
| | | | 2.1.1 | dehydrogenase | | | | |
| | | | blastx.2 | CGI-82 PROTEIN. | sp\|Q9Y391\|Q9Y391 | 74% | 257 | 664 |
| | | | | | | 64% | 186 | 260 |
| H7TBC95 | 865922 | 107 | HMMER | PFAM: 7 transmembrane | PF00001 | 189.5 | 3 | 695 |
| | | | 2.1.1 | receptor (rhodopsin | | | | |
| | | | | family) | | | | |
| | | | blastx.2 | G-protein coupled | sp\|BAA93001\|BAA9 | 56% | 516 | 701 |
| | | | | receptor SALPR. | 3001 | 61% | 51 | 206 |
| | | | | | | 41% | 303 | 440 |
| H7TBC95 | 908115 | 329 | HMMER | PFAM: 7 transmembrane | PF00001 | 189.5 | 3 | 695 |
| | | | 2.1.1 | receptor (rhodopsin | | | | |
| | | | | family) | | | | |
| | | | blastx.2 | angiotensin II receptor | gb\|AAC59635.1\| | 34% | 6 | 695 |
| | | | | [Xenopus laevis] | | | | |
| HBGDA14 | 866258 | 108 | HMMER | PFAM: Alcohol/other | PF00106 | 127.15 | 3 | 299 |
| | | | 1.8 | dehydrogenases, short | | | | |
| | | | | chain type | | | | |
| | | | blastx.2 | 2,3-dihydro-2,3- | pir\|A91904\|DEECDB | 92% | 3 | 482 |
| | | | | dihydroxybenzoate | | | | |
| | | | | dehydrogenase (EC | | | | |
| | | | | 1.3.1.28) - Escherichia | | | | |
| | | | | coli | | | | |
| HSLHT48 | 1207945 | 109 | blastx.14 | RhsA protein [imported] - | pir\|F64805\|F64805 | 100% | 1646 | 1065 |
| | | | | Escherichia coli | | | | |
| HSLHT48 | 871996 | 330 | HMMER | PFAM: Transposase | PF01811 | 200.5 | 153 | 500 |
| | | | 2.1.1 | | | | | |
| | | | blastx.2 | H repeat-associated | pir\|A64806\|A64806 | 84% | 90 | 497 |
| | | | | protein homolog b0706 - | | 93% | 499 | 801 |
| | | | | Escherichia coli | | 62% | 774 | 845 |
| | | | | | | 92% | 422 | 460 |
| HE2KL28 | 1127459 | 110 | blastx.14 | UNC-89 [Caenorhabditis | gi\|1160355\|gb\|AAB0 | 31% | 314 | 586 |
| | | | | elegans] | 0542.1\| | 37% | 317 | 469 |
| | | | | | | 35% | 413 | 589 |
| | | | | | | 28% | 305 | 586 |
| | | | | | | 43% | 314 | 430 |
| | | | | | | 27% | 317 | 586 |
| | | | | | | 28% | 317 | 556 |
| | | | | | | 26% | 314 | 580 |
| | | | | | | 35% | 35 | 193 |
| | | | | | | 36% | 311 | 442 |
| | | | | | | 37% | 314 | 442 |
| | | | | | | 28% | 317 | 556 |
| | | | | | | 40% | 314 | 439 |
| | | | | | | 31% | 2 | 163 |
| | | | | | | 30% | 2 | 178 |
| | | | | | | 33% | 2 | 160 |
| | | | | | | 23% | 305 | 586 |
| | | | | | | 25% | 320 | 574 |
| | | | | | | 42% | 317 | 430 |
| | | | | | | 48% | 464 | 562 |
| | | | | | | 36% | 8 | 157 |
| | | | | | | 32% | 317 | 463 |
| | | | | | | 43% | 476 | 586 |
| | | | | | | 30% | 431 | 586 |
| | | | | | | 33% | 2 | 163 |
| | | | | | | 28% | 2 | 211 |
| | | | | | | 30% | 317 | 433 |
| | | | | | | 39% | 449 | 586 |
| | | | | | | 46% | 68 | 163 |
| | | | | | | 38% | 317 | 442 |
| | | | | | | 40% | 434 | 574 |
| | | | | | | 33% | 314 | 439 |
| | | | | | | 31% | 8 | 187 |
| | | | | | | 29% | 317 | 439 |
| | | | | | | 32% | 314 | 433 |
| | | | | | | 35% | 323 | 442 |
| | | | | | | 35% | 461 | 586 |
| | | | | | | 34% | 308 | 445 |
| | | | | | | 32% | 41 | 187 |
| | | | | | | 35% | 317 | 442 |
| | | | | | | 30% | 2 | 187 |
| | | | | | | 36% | 317 | 430 |
| | | | | | | 35% | 461 | 586 |
| | | | | | | 35% | 461 | 586 |
| | | | | | | 36% | 458 | 589 |
| | | | | | | 40% | 476 | 586 |
| | | | | | | 39% | 464 | 586 |
| | | | | | | 40% | 449 | 568 |
| | | | | | | 27% | 2 | 253 |
| | | | | | | 40% | 449 | 589 |
| | | | | | | 36% | 317 | 430 |
| | | | | | | 35% | 2 | 163 |
| | | | | | | 29% | 2 | 163 |
| | | | | | | 34% | 314 | 427 |
| | | | | | | 43% | 71 | 160 |
| | | | | | | 43% | 68 | 163 |
| | | | | | | 29% | 434 | 586 |
| | | | | | | 34% | 449 | 586 |
| | | | | | | 31% | 470 | 601 |
| | | | | | | 31% | 413 | 586 |
| | | | | | | 33% | 5 | 163 |
| | | | | | | 31% | 2 | 175 |
| | | | | | | 24% | 5 | 214 |
| | | | | | | 31% | 314 | 427 |
| | | | | | | 38% | 449 | 556 |
| | | | | | | 35% | 473 | 589 |
| | | | | | | 30% | 449 | 568 |
| | | | | | | 35% | 62 | 163 |
| | | | | | | 37% | 317 | 421 |
| | | | | | | 34% | 308 | 430 |
| | | | | | | 37% | 77 | 187 |
| | | | | | | 26% | 8 | 133 |
| | | | | | | 28% | 317 | 433 |
| | | | | | | 25% | 317 | 448 |
| | | | | | | 54% | 509 | 574 |
| | | | | | | 43% | 77 | 166 |
| | | | | | | 33% | 488 | 604 |
| | | | | | | 28% | 263 | 472 |
| | | | | | | 35% | 77 | 187 |
| | | | | | | 34% | 62 | 175 |
| | | | | | | 34% | 488 | 583 |
| | | | | | | 31% | 317 | 430 |
| | | | | | | 24% | 2 | 187 |
| | | | | | | 31% | 62 | 157 |
| | | | | | | 43% | 461 | 556 |
| | | | | | | 42% | 488 | 565 |
| | | | | | | 33% | 89 | 196 |
| | | | | | | 30% | 314 | 433 |
| | | | | | | 30% | 488 | 586 |
| | | | | | | 28% | 2 | 148 |
| | | | | | | 29% | 317 | 418 |
| | | | | | | 56% | 2 | 49 |
| | | | | | | 30% | 62 | 187 |
| | | | | light chain kinase | | | | |
| | | | | precursor (EC 2.7.2.37) | | | | |
| | | | | [Gallus gallus] | | | | |
| HCFND04 | 1156311 | 111 | blastx.14 | ZK328.4 gene product | gi\|1213535\|gb\|AAA9 | 52% | 768 | 869 |
| | | | | [Caenorhabditis elegans] | 1247.1\| | 35% | 870 | 989 |
| | | | | | | 28% | 531 | 722 |
| | | | | | | 39% | 984 | 1112 |
| | | | | | | 27% | 150 | 257 |
| | | | | | | 31% | 144 | 209 |
| HCFND04 | 873441 | 332 | HMMER | PFAM: Zinc-binding | PF00099 | 5.29 | 834 | 881 |
| | | | 1.8 | metalloprotease domain | | | | |
| HLDBM06 | 1200004 | 112 | blastx.14 | SURFACE PROTEIN | sp\|Q62875\|Q62875 | 46% | 144 | 497 |
| | | | | MCA-32. | | 45% | 1023 | 1121 |
| | | | | | | 33% | 891 | 1007 |
| HLDBM06 | 878341 | 333 | HMMER | PFAM: IG | PF00047 | 11.16 | 266 | 436 |
| | | | 1.8 | (immunoglobulin) | | | | |
| | | | | superfamily | | | | |
| | | | blastx.2 | surface protein MCA-32 | gb\|AAC52339.1\| | 46% | 134 | 487 |
| | | | | [Rattus norvegicus] | | | | |
| HDPMT22 | 1216488 | 113 | blastx.14 | hypothetical protein | pir\|T21659\|T21659 | 61% | 742 | 1200 |
| | | | | F32D8.4 - Caenorhabditis | | 48% | 1192 | 1722 |
| | | | | elegans | | 52% | 148 | 357 |
| | | | | | | 36% | 602 | 766 |
| | | | | | | 47% | 925 | 987 |
| | | | | | | 26% | 1579 | 1701 |
| HDPMT22 | 881656 | 334 | HMMER | PFAM: FAD binding | PF01565 | 37.8 | 141 | 332 |
| | | | 2.1.1 | domain | | | | |
| | | | blastx.2 | hypothetical protein | pir\|T21659\|T21659 | 50% | 147 | 332 |
| | | | | F32D8.4 - Caenorhabditis | | | | |
| | | | | elegans | | | | |
| HDPRN38 | 883658 | 114 | HMMER | PFAM: Alcohol/other | PF00106 | 175.59 | 123 | 680 |
| | | | 1.8 | dehydrogenases, short | | | | |
| | | | | chain type | | | | |
| | | | blastx.2 | Peroxisomal trans 2-enoyl | sp\|AAF69798\|AAF69 | 81% | 111 | 824 |
| | | | | CoA reductase (EC | 798 | 84% | 61 | 138 |
| | | | | 1.3.1.8). | | | | |
| HETKH30 | 884009 | 115 | HMMER | PFAM: Alcohol/other | PF00106 | 137.09 | 300 | 881 |
| | | | 1.8 | dehydrogenases, short | | | | |
| | | | | chain type | | | | |
| | | | blastx.2 | PUTATIVE STEROID | sp\|O57314\|DHBX_A | 54% | 294 | 866 |
| | | | | DEHYDROGENASE | NAPL | | | |
| | | | | SPM2 (EC 1.1.1.-). | | | | |
| HPIBQ37 | 884289 | 116 | HMMER | PFAM: Immunoglobulin | PF00047 | 42 | 149 | 355 |
| | | | 2.1.1 | domain | | | | |
| | | | blastx | (AF111713) junctional | gb\|AAD42050.1\|AF1 | 100% | 89 | 385 |
| | | | | adhesion molecule [Homo | 11713_1 | 84% | 385 | 423 |
| | | | | sapiens] | | | | |
| HE8DY76 | 877906 | 335 | HMMER | PFAM: IG | PF00047 | 11.31 | 18 | 131 |
| | | | 1.8 | (immunoglobulin) | | | | |
| | | | | superfamily | | | | |
| | | | blastx | (AL049946) hypothetical | emb\|CAB43220.1\| | 44% | 36 | 260 |
| | | | | protein [Homo sapiens] | 50% | 256 | 471 | |
| | | | | | | 36% | 36 | 242 |
| | | | | | | 30% | 51 | 257 |
| | | | | | | 45% | 352 | 471 |
| | | | | | | 42% | 69 | 152 |
| | | | | | | 23% | 24 | 179 |
| | | | | | | 34% | 265 | 333 |
| | | | | | | 40% | 367 | 441 |
| | | | | | | 27% | 334 | 474 |
| | | | | | | 27% | 265 | 330 |
| | | | | | | 37% | 355 | 441 |
| | | | | | | 35% | 265 | 315 |
| HE8DY76 | 887614 | 336 | HMMER | PFAM: Immunoglobulin | PF00047 | 23.8 | 55 | 261 |
| | | | 2.1.1 | domain | | | | |
| HSTBK14 | 887715 | 118 | HMMER | PFAM: IG | PF00047 | 3.44 | 159 | 230 |
| | | | 1.8 | (immunoglobulin) | | | | |
| | | | | superfamily | | | | |
| | | | blastx.2 | prostaglandin F2a receptor | gb\|AAC18426.1\| | 74% | 3 | 293 |
| | | | | regulatory protein | | 96% | 295 | 369 |
| | | | | precursor [Rattus | | 26% | 3 | 248 |
| | | | | norvegicus] | | 100% | 371 | 394 |
| HE9RE21 | 888243 | 337 | HMMER | PFAM: short chain | PF00106 | 81.3 | 96 | 386 |
| | | | 2.1.1 | dehydrogenase | | | | |
| | | | blastx.2 | ESTRADIOL 17 BETA- | sp\|P56937\|DHB7_H | 100% | 90 | 419 |
| | | | | DEHYDROGENASE 7 | UMAN | 88% | 421 | 522 |
| | | | | (EC 1.1.1.62) 1 | | | | |
| HKACI15 | 892363 | 120 | HMMER | PFAM: Immunoglobulin | PF00047 | 65.3 | 140 | 340 |
| | | | 2.1.1 | domain | | | | |
| | | | blastx.2 | (AF111713) junctional | gb\|AAD42050.1\|AF1 | 92% | 143 | 904 |
| | | | | adhesion molecule [Homo | 11713_1 | 100% | 77 | 106 |
| | | | | sapiens] | | | | |
| HRDBE43 | 894862 | 121 | HMMER | PFAM: Laminin G | PF00054 | 195.2 | 191 | 580 |
| | | | 2.1.1 | domain | | | | |
| | | | blastx.2 | CG8403 PROTEIN. | sp\|Q9V7I4\|Q9V7I4 | 33% | 2 | 1288 |
| | | | | | | 37% | 35 | 823 |
| | | | | | | 36% | 764 | 1285 |
| | | | | | | 26% | 173 | 607 |
| | | | | | | 47% | 686 | 730 |
| HRDBE43 | 947966 | 338 | HMMER | PFAM: Laminin G | PF00054 | 102.93 | 1023 | 661 |
| | | | 1.8 | domain | | | | |
| | | | blastx.14 | perlecan [Mus musculus] | gi\|200296\|gb\|AAA39 | 46% | 963 | 640 |
| | | | | | 911.1\| | 31% | 1627 | 1250 |
| | | | | | | 38% | 1624 | 1361 |
| | | | | | | 38% | 1630 | 1379 |
| | | | | | | 40% | 966 | 715 |
| | | | | | | 32% | 957 | 661 |
| | | | | | | 72% | 1696 | 1643 |
| | | | | | | 41% | 1203 | 1132 |
| | | | | | | 47% | 1840 | 1772 |
| | | | | | | 33% | 1182 | 1111 |
| | | | | | | 50% | 1242 | 1189 |
| | | | | | | 47% | 1834 | 1784 |
| | | | | | | 45% | 1867 | 1796 |
| | | | | | | 47% | 1864 | 1814 |
| | | | | | | 57% | 1182 | 1141 |
| | | | | | | 53% | 1834 | 1796 |
| | | | | | | 61% | 1020 | 982 |
| | | | | | | 44% | 1194 | 1141 |
| | | | | | | 50% | 1834 | 1793 |
| | | | | | | 63% | 1828 | 1796 |
| | | | | | | 66% | 1227 | 1201 |
| | | | | | | 53% | 1834 | 1796 |
| | | | | | | 46% | 1239 | 1201 |
| | | | | | | 47% | 1188 | 1138 |
| | | | | | | 31% | 1699 | 1643 |
| | | | | | | 40% | 1538 | 1494 |
| | | | | | | 66% | 1185 | 1159 |
| | | | | | | 54% | 1828 | 1796 |
| | | | | | | 45% | 1828 | 1796 |
| | | | | | | 60% | 1227 | 1198 |
| | | | | | | 27% | 1158 | 1060 |
| | | | | | | 42% | 1023 | 982 |
| HSSKD85 | 908141 | 122 | HMMER | PFAM: EGF-like domain | PE00008 | 129.2 | 812 | 910 |
| | | | 2.1.1 | | | | | |
| | | | blastx.2 | EGF repeat | pir\|T30176\|T30176 | 89% | 332 | 1006 |
| | | | | transmembrane protein - | | 40% | 356 | 787 |
| | | | | mouse | | 36% | 186 | 335 |
| HFOXL77 | 910698 | 123 | HMMER | PFAM: EGF-like domain | PF00008 | 51 | 285 | 386 |
| | | | 2.1.1 | | | | | |
| | | | blastx.2 | CELL SURFACE | sp\|O35516\|O35516 | 43% | 285 | 485 |
| | | | | PROTEIN. | | 45% | 285 | 488 |
| | | | | | | 41% | 285 | 485 |
| | | | | | | 48% | 285 | 482 |
| | | | | | | 40% | 285 | 485 |
| | | | | | | 43% | 285 | 488 |
| | | | | | | 38% | 285 | 485 |
| | | | | | | 42% | 300 | 488 |
| | | | | | | 44% | 285 | 485 |
| | | | | | | 39% | 285 | 482 |
| | | | | | | 43% | 285 | 485 |
| | | | | | | 37% | 285 | 485 |
| | | | | | | 40% | 285 | 485 |
| | | | | | | 46% | 285 | 473 |
| | | | | | | 38% | 285 | 485 |
| | | | | | | 35% | 285 | 485 |
| | | | | | | 31% | 285 | 512 |
| | | | | | | 36% | 294 | 482 |
| | | | | | | 38% | 285 | 488 |
| | | | | | | 52% | 143 | 193 |
| HBXCZ29 | 910842 | 124 | HMMER | PFAM: EGF-like domain | PF00008 | 32.85 | 608 | 718 |
| | | | 1.8 | | | | | |
| | | | blastx.2 | Low density lipoprotein | sp\|AAF70379\|AAF70 | 83% | 410 | 805 |
| | | | | receptor related protein- | 379 | 96% | 2 | 319 |
| | | | | deleted 1 | | 32% | 527 | 802 |
| | | | | | | 30% | 2 | 292 |
| | | | | | | 33% | 5 | 487 |
| | | | | | | 29% | 527 | 802 |
| | | | | | | 35% | 17 | 250 |
| | | | | | | 27% | 8 | 316 |
| | | | | | | 52% | 276 | 464 |
| | | | | | | 30% | 17 | 283 |
| | | | | | | 28% | 380 | 718 |
| | | | | | | 32% | 5 | 256 |
| | | | | | | 33% | 5 | 244 |
| | | | | | | 29% | 527 | 811 |
| | | | | | | 26% | 17 | 298 |
| | | | | | | 33% | 17 | 232 |
| | | | | | | 35% | 17 | 247 |
| | | | | | | 32% | 17 | 223 |
| | | | | | | 32% | 53 | 253 |
| | | | | | | 28% | 11 | 250 |
| | | | | | | 65% | 376 | 453 |
| | | | | | | 35% | 5 | 130 |
| | | | | | | 26% | 8 | 271 |
| | | | | | | 33% | 32 | 130 |
| | | | | | | 32% | 17 | 136 |
| | | | | | | 27% | 11 | 250 |
| | | | | | | 24% | 5 | 289 |
| | | | | | | 23% | 17 | 214 |
| | | | | | | 27% | 2 | 184 |
| | | | | | | 29% | 17 | 223 |
| | | | | | | 40% | 56 | 130 |
| | | | | | | 20% | 35 | 250 |
| | | | | | | 25% | 416 | 778 |
| | | | | | | 30% | 83 | 208 |
| | | | | | | 32% | 524 | 703 |
| | | | | | | 46% | 419 | 487 |
| | | | | | | 38% | 65 | 172 |
| | | | | | | 30% | 708 | 836 |
| | | | | | | 40% | 617 | 703 |
| | | | | | | 45% | 416 | 472 |
| HNTMB90 | 910934 | 125 | HMMER | PFAM: Fibronectin type | PF00041 | 71.5 | 204 | 470 |
| | | | 2.1.1 | III domain | | | | |
| | | | blastx.2 | Neighbor of Punc ell | sp\|AAF65930\|AAF65 | 35% | 87 | 515 |
| | | | | protein. | 930 | | | |
| HMKCH92 | 910936 | 126 | HMMER | PFAM: Fibronectin type | PF00041 | 75.15 | 174 | 443 |
| | | | 1.8 | III domain | | | | |
| | | | blastx.2 | NEURAL ADHESION | sp\|Q9UQ52\|Q9UQ52 | 93% | 102 | 680 |
| | | | | MOLECULE NB-3. | | 100% | 2 | 103 |
| | | | | | | 97% | 700 | 801 |
| | | | | | | 26% | 135 | 605 |
| | | | | | | 24% | 228 | 602 |
| HTELV86 | 910946 | 127 | HMMER | PFAM: Fibronectin type | PF00041 | 77.22 | 400 | 669 |
| | | | 1.8 | III domain | | | | |
| | | | blastx.14 | neural cell adhesion | gi\|1016012\|gb\|AAC5 | 96% | 1 | 918 |
| | | | | protein BIG-2 precursor | 2262.1\| | 68% | 960 | 1025 |
| | | | | [Rattus norvegicus] | | 92% | 926 | 967 |
| | | | | | | 66% | 22 | 75 |
| | | | | | | 28% | 1 | 171 |
| | | | | | | 55% | 1 | 54 |
| | | | | | | 28% | 286 | 399 |
| | | | | | | 42% | 10 | 93 |
| | | | | | | 44% | 280 | 354 |
| | | | | | | 33% | 274 | 390 |
| | | | | | | 33% | 286 | 357 |
| | | | | | | 100% | 1028 | 1054 |
| | | | | | | 42% | 184 | 225 |
| | | | | | | 100% | 1057 | 1077 |
| | | | | | | 28% | 658 | 741 |
| HNTAF23 | 910947 | 128 | HMMER | PFAM: Fibronectin type | PF00041 | 15.99 | 174 | 242 |
| | | | 1.8 | III domain | | | | |
| | | | blastx.2 | hypothetical protein | pir\|T46428\|T46428 | 60% | 84 | 242 |
| | | | | DKFZp434B2226.1 - | | | | |
| | | | | human (fragment) | | | | |
| HDDAF49 | 911314 | 339 | HMMER | PFAM: Zinc-binding | PF00099 | 5.07 | 144 | 173 |
| | | | 1.8 | metalloprotease domain | | | | |
| | | | blastx.2 | (AL133047) hypothetical | emb\|CAB61374.1\| | 52% | 9 | 269 |
| | | | | protein [Homo sapiens] | | | | |
| HHEZT58 | 911416 | 130 | HMMER | PFAM: Src homology | PF00018 | 80.7 | 277 | 444 |
| | | | 1.8 | domain 3 | | | | |
| | | | blastx.14 | myosin I heavy chain | gi\|167839\|gb\|AAA33 | 47% | 277 | 435 |
| | | | | [Dictyostelium | 229.1\| | | | |
| | | | | discoideum] | | | | |
| HETEY43 | 911466 | 340 | HMMER | PFAM: Myosin head | PF00063 | 73.8 | 189 | 338 |
| | | | 2.1.1 | (motor domain) | | | | |
| | | | blastx | myosin [Arabidopsis | emb\|CAA84065.1\| | 45% | 192 | 437 |
| | | | | thaliana] | | 51% | 497 | 613 |
| | | | | | | 62% | 30 | 101 |
| | | | | | | 66% | 133 | 186 |
| HWHQR10 | 1137770 | 132 | blastx.14 | bK57G9.1 (novel Kringle | gi\|6572252\|emb\|CAB | 51% | 13 | 117 |
| | | | | and CUB domain protein) | 62952.1\| | 32% | 103 | 231 |
| | | | | [Homo sapiens] | | 40% | 262 | 336 |
| HWHQR10 | 915008 | 341 | HMMER | PFAM: CUB domain | PF00431 | 15.29 | 187 | 312 |
| | | | 1.8 | | | | | |
| | | | blastx.2 | BK57G9.1 (NOVEL | sp\|Q9UGU1\|Q9UGU | 51% | 6 | 92 |
| | | | | KRINGLE AND CUB | 1 | 48% | 6 | 98 |
| | | | | DOMAIN PROTEIN) | | 41% | 199 | 321 |
| | | | | (FRAGMENT). | | 43% | 119 | 166 |
| HAUAI17 | 921674 | 133 | HMMER | PFAM: short chain | PF00106 | 198.7 | 172 | 687 |
| | | | 2.1.1 | dehydrogenase | | | | |
| | | | blastx.2 | RETINAL SHORT- | sp\|Q9UKU3\|Q9UKU | 81% | 145 | 687 |
| | | | | CHAIN | 3 | 100% | 687 | 857 |
| | | | | DEHYDROGENASE/RE | | | | |
| | | | | DUCTASE RETSDR3. | | | | |
| HORBP08 | 1220903 | 134 | blastx.14 | hypothetical protein | pir\|T22545\|T22545 | 37% | 1817 | 2110 |
| | | | | F53B6.2 - Caenorhabditis | | 34% | 2609 | 2854 |
| | | | | elegans | | 33% | 4877 | 5098 |
| | | | | | | 68% | 170 | 256 |
| | | | | | | 33% | 1898 | 2092 |
| | | | | | | 45% | 4592 | 4729 |
| | | | | | | 54% | 515 | 619 |
| | | | | | | 39% | 1091 | 1228 |
| | | | | | | 35% | 2150 | 2293 |
| | | | | | | 57% | 2375 | 2458 |
| | | | | | | 35% | 4586 | 4729 |
| | | | | | | 39% | 1100 | 1228 |
| | | | | | | 42% | 1307 | 1432 |
| | | | | | | 28% | 2252 | 2458 |
| | | | | | | 34% | 1577 | 1717 |
| | | | | | | 40% | 1106 | 1225 |
| | | | | | | 42% | 2336 | 2434 |
| | | | | | | 45% | 2180 | 2284 |
| | | | | | | 56% | 2018 | 2092 |
| | | | | | | 39% | 2216 | 2338 |
| | | | | | | 31% | 2030 | 2200 |
| | | | | | | 43% | 1133 | 1228 |
| | | | | | | 56% | 4655 | 4729 |
| | | | | | | 43% | 1310 | 1405 |
| | | | | | | 41% | 2366 | 2458 |
| | | | | | | 53% | 1148 | 1225 |
| | | | | | | 25% | 2306 | 2458 |
| | | | | | | 42% | 1328 | 1405 |
| | | | | | | 27% | 2396 | 2569 |
| | | | | | | 23% | 3821 | 4012 |
| | | | | | | 47% | 1292 | 1360 |
| | | | | | | 50% | 4673 | 4756 |
| | | | | | | 33% | 5201 | 5290 |
| | | | | | | 22% | 4703 | 4912 |
| | | | | | | 37% | 2159 | 2254 |
| | | | | | | 29% | 1166 | 1330 |
| | | | | | | 42% | 1121 | 1198 |
| | | | | | | 32% | 959 | 1078 |
| | | | | | | 41% | 2207 | 2278 |
| | | | | | | 32% | 1160 | 1243 |
| | | | | | | 32% | 4631 | 4705 |
| | | | | | | 35% | 2126 | 2209 |
| | | | | | | 46% | 2201 | 2278 |
| | | | | | | 42% | 1325 | 1402 |
| | | | | | | 26% | 4592 | 4729 |
| | | | | | | 44% | 4655 | 4729 |
| | | | | | | 35% | 1976 | 2068 |
| | | | | | | 24% | 3602 | 3763 |
| | | | | | | 30% | 1955 | 2092 |
| | | | | | | 44% | 1844 | 1918 |
| | | | | | | 41% | 2198 | 2284 |
| | | | | | | 41% | 1604 | 1690 |
| | | | | | | 38% | 2222 | 2299 |
| | | | | | | 25% | 1604 | 1765 |
| | | | | | | 45% | 4673 | 4732 |
| | | | | | | 35% | 1583 | 1675 |
| | | | | | | 40% | 2399 | 2458 |
| | | | | | | 52% | 1604 | 1660 |
| | | | | | | 32% | 182 | 265 |
| | | | | | | 45% | 4820 | 4879 |
| | | | | | | 34% | 179 | 247 |
| | | | | | | 43% | 182 | 250 |
| | | | | | | 25% | 4805 | 4885 |
| | | | | | | 38% | 4484 | 4561 |
| | | | | | | 45% | 1346 | 1405 |
| | | | | | | 52% | 5087 | 5155 |
| | | | | | | 34% | 1859 | 1927 |
| | | | | | | 28% | 4796 | 4879 |
| | | | | | | 72% | 2015 | 2047 |
| | | | | | | 44% | 1970 | 2023 |
| | | | | | | 66% | 1148 | 1183 |
| | | | | | | 50% | 5021 | 5062 |
| | | | | | | 40% | 5120 | 5200 |
| | | | | | | 47% | 1604 | 1660 |
| | | | | | | 40% | 2033 | 2092 |
| | | | | | | 29% | 965 | 1075 |
| | | | | | | 40% | 1859 | 1918 |
| | | | | | | 50% | 965 | 1012 |
| | | | | | | 26% | 4976 | 5065 |
| | | | | | | 63% | 188 | 220 |
| | | | | | | 32% | 4979 | 5062 |
| | | | | | | 22% | 215 | 361 |
| | | | | | | 50% | 989 | 1036 |
| | | | | | | 40% | 1343 | 1402 |
| | | | | | | 53% | 5021 | 5059 |
| | | | | | | 35% | 1328 | 1378 |
| | | | | | | 32% | 962 | 1036 |
| | | | | | | 63% | 2018 | 2050 |
| | | | | | | 33% | 188 | 259 |
| | | | | | | 29% | 962 | 1063 |
| | | | | | | 32% | 4205 | 4324 |
| | | | | | | 26% | 1328 | 1405 |
| | | | | | | 32% | 1844 | 1918 |
| | | | | | | 33% | 2396 | 2458 |
| | | | | | | 33% | 2327 | 2398 |
| | | | | | | 32% | 4019 | 4102 |
| | | | | | | 24% | 2066 | 2200 |
| | | | | | | 36% | 1859 | 1933 |
| | | | | | | 35% | 1094 | 1153 |
| | | | | | | 24% | 2267 | 2377 |
| | | | | | | 58% | 2036 | 2071 |
| | | | | | | 32% | 4937 | 5011 |
| | | | | | | 50% | 1715 | 1756 |
| | | | | | | 43% | 989 | 1036 |
| | | | | | | 50% | 2201 | 2236 |
| | | | | | | 37% | 4481 | 4528 |
| | | | | | | 42% | 4484 | 4525 |
| | | | | | | 40% | 1871 | 1951 |
| | | | | | | 54% | 2387 | 2419 |
| | | | | | | 31% | 1604 | 1660 |
| | | | | | | 37% | 1712 | 1783 |
| | | | | | | 29% | 5069 | 5170 |
| | | | | | | 55% | 5036 | 5062 |
| | | | | | | 33% | 4945 | 5016 |
| | | | | | | 36% | 1885 | 1959 |
| | | | | | | 35% | 1841 | 1891 |
| | | | | | | 27% | 2411 | 2509 |
| | | | | | | 46% | 1976 | 2014 |
| | | | | | | 42% | 4793 | 4834 |
| | | | | | | 45% | 1604 | 1636 |
| | | | | | | 63% | 1193 | 1225 |
| | | | | | | 21% | 4724 | 4834 |
| | | | | | | 32% | 3635 | 3718 |
| | | | | | | 45% | 4655 | 4687 |
| | | | | | | 29% | 2495 | 2587 |
| | | | | | | 54% | 188 | 220 |
| | | | | | | 58% | 4963 | 4998 |
| | | | | | | 30% | 4946 | 5014 |
| | | | | | | 43% | 3996 | 4043 |
| | | | | | | 38% | 4973 | 5035 |
| | | | | | | 31% | 4960 | 5016 |
| | | | | | | 46% | 4478 | 4522 |
| | | | | | | 35% | 3868 | 3927 |
| | | | | | | 28% | 4937 | 5011 |
| | | | | | | 42% | 182 | 238 |
| | | | | | | 45% | 4652 | 4684 |
| | | | | | | 71% | 4631 | 4651 |
| | | | | | | 46% | 2159 | 2197 |
| | | | | | | 35% | 2339 | 2380 |
| | | | | | | 42% | 5054 | 5095 |
| | | | | | | 42% | 14 | 70 |
| | | | | | | 54% | 4901 | 4933 |
| | | | | | | 24% | 5150 | 5248 |
| | | | | | | 45% | 1145 | 1177 |
| | | | | | | 42% | 5069 | 5125 |
| | | | | | | 28% | 3575 | 3649 |
| | | | | | | 62% | 4502 | 4525 |
| | | | | | | 27% | 1433 | 1486 |
| | | | | | | 54% | 3987 | 4019 |
| | | | | | | 42% | 4844 | 4885 |
| HORBP08 | 926702 | 342 | HMMER | PFAM: Immunoglobulin | PF00047 | 86.3 | 552 | 716 |
| | | | 2.1.1 | domain | | | | |
| | | | blastx.14 | predicted protein contains | gi\|3875955\|emb\|CAA | 37% | 240 | 470 |
| | | | | a large number of Ig 1 1 | 87335.1\| | 31% | 243 | 464 |
| | | | | comes from this gene; | | 28% | 564 | 809 |
| | | | | cDNA EST yk248d7.3 | | 28% | 249 | 521 |
| | | | | comes from this gene; c | | 28% | 267 | 491 |
| | | | | | | 35% | 657 | 800 |
| | | | | | | 39% | 648 | 761 |
| | | | | | | 53% | 882 | 959 |
| | | | | | | 35% | 501 | 620 |
| | | | | | | 42% | 864 | 962 |
| | | | | | | 29% | 663 | 833 |
| | | | | | | 48% | 249 | 329 |
| | | | | | | 36% | 246 | 335 |
| | | | | | | 32% | 660 | 779 |
| | | | | | | 41% | 246 | 332 |
| | | | | | | 33% | 663 | 779 |
| | | | | | | 44% | 648 | 755 |
| | | | | | | 38% | 669 | 776 |
| | | | | | | 38% | 663 | 779 |
| | | | | | | 32% | 660 | 809 |
| | | | | | | 41% | 990 | 1082 |
| | | | | | | 31% | 486 | 620 |
| | | | | | | 23% | 864 | 1136 |
| | | | | | | 50% | 882 | 953 |
| | | | | | | 26% | 333 | 524 |
| | | | | | | 46% | 885 | 962 |
| | | | | | | 31% | 510 | 632 |
| | | | | | | 30% | 636 | 773 |
| | | | | | | 35% | 231 | 323 |
| | | | | | | 34% | 882 | 986 |
| | | | | | | 48% | 687 | 779 |
| | | | | | | 34% | 240 | 353 |
| | | | | | | 37% | 882 | 962 |
| | | | | | | 42% | 903 | 986 |
| | | | | | | 39% | 504 | 617 |
| | | | | | | 26% | 654 | 779 |
| | | | | | | 33% | 240 | 356 |
| | | | | | | 34% | 858 | 962 |
| | | | | | | 32% | 993 | 1112 |
| | | | | | | 30% | 513 | 620 |
| | | | | | | 32% | 501 | 638 |
| | | | | | | 40% | 999 | 1079 |
| | | | | | | 40% | 240 | 314 |
| | | | | | | 35% | 549 | 632 |
| | | | | | | 26% | 654 | 779 |
| | | | | | | 31% | 882 | 968 |
| | | | | | | 33% | 507 | 614 |
| | | | | | | 35% | 663 | 779 |
| | | | | | | 29% | 333 | 473 |
| | | | | | | 27% | 285 | 491 |
| | | | | | | 31% | 222 | 326 |
| | | | | | | 41% | 246 | 317 |
| | | | | | | 31% | 354 | 494 |
| | | | | | | 41% | 1008 | 1079 |
| | | | | | | 25% | 834 | 965 |
| | | | | | | 40% | 249 | 308 |
| | | | | | | 43% | 375 | 464 |
| | | | | | | 36% | 1005 | 1103 |
| | | | | | | 36% | 897 | 962 |
| | | | | | | 32% | 663 | 773 |
| | | | | | | 25% | 648 | 779 |
| | | | | | | 40% | 882 | 962 |
| | | | | | | 34% | 894 | 962 |
| | | | | | | 52% | 669 | 731 |
| | | | | | | 25% | 507 | 635 |
| | | | | | | 28% | 633 | 779 |
| | | | | | | 34% | 687 | 791 |
| | | | | | | 28% | 663 | 812 |
| | | | | | | 35% | 381 | 491 |
| | | | | | | 40% | 240 | 305 |
| | | | | | | 25% | 663 | 836 |
| | | | | | | 34% | 894 | 962 |
| | | | | | | 39% | 549 | 632 |
| | | | | | | 28% | 381 | 506 |
| | | | | | | 39% | 249 | 332 |
| | | | | | | 26% | 504 | 617 |
| | | | | | | 41% | 243 | 314 |
| | | | | | | 35% | 663 | 773 |
| | | | | | | 35% | 663 | 779 |
| | | | | | | 26% | 345 | 470 |
| | | | | | | 33% | 336 | 470 |
| | | | | | | 31% | 981 | 1085 |
| | | | | | | 28% | 663 | 779 |
| | | | | | | 28% | 1011 | 1115 |
| | | | | | | 45% | 897 | 962 |
| | | | | | | 22% | 660 | 794 |
| | | | | | | 28% | 351 | 488 |
| | | | | | | 31% | 351 | 491 |
| | | | | | | 35% | 378 | 470 |
| | | | | | | 27% | 648 | 779 |
| | | | | | | 39% | 687 | 770 |
| | | | | | | 34% | 525 | 638 |
| | | | | | | 30% | 882 | 959 |
| | | | | | | 27% | 531 | 617 |
| | | | | | | 29% | 1002 | 1103 |
| | | | | | | 33% | 525 | 614 |
| | | | | | | 30% | 348 | 473 |
| | | | | | | 45% | 243 | 302 |
| | | | | | | 38% | 549 | 611 |
| | | | | | | 27% | 660 | 791 |
| | | | | | | 25% | 507 | 626 |
| | | | | | | 30% | 561 | 620 |
| | | | | | | 37% | 882 | 962 |
| | | | | | | 37% | 882 | 962 |
| | | | | | | 26% | 186 | 356 |
| | | | | | | 40% | 870 | 944 |
| | | | | | | 22% | 333 | 506 |
| | | | | | | 31% | 354 | 488 |
| | | | | | | 34% | 1011 | 1079 |
| | | | | | | 27% | 834 | 974 |
| | | | | | | 29% | 354 | 494 |
| | | | | | | 27% | 660 | 779 |
| | | | | | | 33% | 330 | 464 |
| | | | | | | 43% | 1011 | 1079 |
| | | | | | | 34% | 240 | 353 |
| | | | | | | 39% | 1011 | 1079 |
| | | | | | | 43% | 1011 | 1079 |
| | | | | | | 40% | 375 | 464 |
| | | | | | | 21% | 660 | 797 |
| | | | | | | 37% | 378 | 473 |
| | | | | | | 26% | 990 | 1079 |
| | | | | | | 42% | 909 | 965 |
| | | | | | | 26% | 348 | 494 |
| | | | | | | 29% | 663 | 785 |
| | | | | | | 42% | 381 | 464 |
| | | | | | | 28% | 657 | 773 |
| | | | | | | 34% | 1002 | 1079 |
| | | | | | | 39% | 996 | 1079 |
| | | | | | | 32% | 867 | 941 |
| | | | | | | 30% | 885 | 962 |
| | | | | | | 46% | 663 | 746 |
| | | | | | | 26% | 378 | 536 |
| | | | | | | 47% | 243 | 299 |
| | | | | | | 26% | 696 | 821 |
| | | | | | | 41% | 561 | 611 |
| | | | | | | 34% | 552 | 620 |
| | | | | | | 25% | 1002 | 1109 |
| | | | | | | 34% | 888 | 974 |
| | | | | | | 52% | 561 | 611 |
| | | | | | | 40% | 243 | 317 |
| | | | | | | 34% | 345 | 458 |
| | | | | | | 20% | 663 | 779 |
| | | | | | | 38% | 561 | 614 |
| | | | | | | 33% | 897 | 1013 |
| | | | | | | 30% | 1002 | 1109 |
| | | | | | | 46% | 255 | 293 |
| | | | | | | 45% | 897 | 962 |
| | | | | | | 42% | 387 | 464 |
| | | | | | | 26% | 654 | 779 |
| | | | | | | 44% | 249 | 302 |
| | | | | | | 27% | 897 | 962 |
| | | | | | | 26% | 1011 | 1112 |
| | | | | | | 25% | 378 | 485 |
| | | | | | | 28% | 975 | 1079 |
| | | | | | | 23% | 240 | 329 |
| | | | | | | 31% | 564 | 620 |
| | | | | | | 18% | 507 | 653 |
| | | | | | | 42% | 903 | 959 |
| | | | | | | 33% | 243 | 314 |
| | | | | | | 41% | 561 | 611 |
| | | | | | | 50% | 381 | 446 |
| | | | | | | 40% | 255 | 314 |
| | | | | | | 39% | 894 | 962 |
| | | | | | | 57% | 381 | 422 |
| | | | | | | 36% | 876 | 941 |
| | | | | | | 34% | 1002 | 1079 |
| | | | | | | 33% | 579 | 641 |
| | | | | | | 39% | 354 | 422 |
| | | | | | | 29% | 1044 | 1115 |
| | | | | | | 34% | 1002 | 1079 |
| | | | | | | 20% | 546 | 632 |
| | | | | | | 31% | 1017 | 1103 |
| | | | | | | 19% | 990 | 1115 |
| | | | | | | 28% | 243 | 317 |
| | | | | | | 46% | 1035 | 1079 |
| | | | | | | 28% | 1002 | 1085 |
| | | | | | | 20% | 333 | 521 |
| | | | | | | 29% | 993 | 1115 |
| | | | | | | 54% | 974 | 1006 |
| | | | | | | 32% | 255 | 329 |
| | | | | | | 24% | 537 | 635 |
| | | | | | | 39% | 354 | 422 |
| | | | | | | 30% | 1002 | 1079 |
| | | | | | | 26% | 663 | 776 |
| | | | | | | 33% | 909 | 962 |
| | | | | | | 34% | 630 | 698 |
| | | | | | | 18% | 960 | 1109 |
| | | | | | | 28% | 354 | 470 |
| | | | | | | 58% | 1044 | 1079 |
| | | | | | | 50% | 1044 | 1079 |
| | | | | | | 33% | 567 | 620 |
| | | | | | | 34% | 354 | 422 |
| | | | | | | 34% | 339 | 470 |
| | | | | | | 40% | 882 | 941 |
| | | | | | | 35% | 243 | 293 |
| | | | | | | 69% | 999 | 1037 |
| | | | | | | 30% | 1011 | 1079 |
| | | | | | | 26% | 663 | 797 |
| | | | | | | 28% | 339 | 473 |
| | | | | | | 60% | 1050 | 1079 |
| | | | | | | 36% | 234 | 308 |
| | | | | | | 31% | 249 | 314 |
| | | | | | | 32% | 240 | 314 |
| | | | | | | 30% | 660 | 779 |
| | | | | | | 22% | 669 | 800 |
| | | | | | | 29% | 276 | 347 |
| | | | | | | 26% | 564 | 632 |
| | | | | | | 32% | 882 | 956 |
| | | | | | | 23% | 861 | 974 |
| | | | | | | 50% | 1044 | 1079 |
| | | | | | | 30% | 288 | 356 |
| | | | | | | 63% | 1362 | 1394 |
| | | | | | | 31% | 351 | 464 |
| | | | | | | 33% | 243 | 305 |
| | | | | | | 25% | 387 | 467 |
| | | | | | | 50% | 345 | 386 |
| | | | | | | 42% | 661 | 723 |
| HORBP08 | 962906 | 343 | HMMER | PFAM: IG | PF00047 | 6.24 | 155 | 36 |
| | | | 1.8 | (immunoglobulin) | | | | |
| | | | | superfamily | | | | |
| HKGDI91 | 1111281 | 135 | blastx.14 | (AB013440) Dll3 protein | gi\|3721842\|dbj\|BAA3 | 92% | 181 | 405 |
| | | | | [Mus musculus] | 3716.1\| | 40% | 169 | 294 |
| | | | | | | 47% | 193 | 300 |
| | | | | | | 44% | 325 | 405 |
| | | | | | | 41% | 304 | 405 |
| HKGDI91 | 927222 | 344 | HMMER | PFAM: EGF-like domain | PF00008 | 36.48 | 255 | 359 |
| | | | 1.8 | | | | | |
| | | | blastx.2 | DLL3 protein precursor. | sp\|AAF62542\|AAF62 | 100% | 180 | 404 |
| | | | | | 542 | 39% | 111 | 431 |
| | | | | | | 42% | 192 | 404 |
| HNHNP81 | 928378 | 136 | HMMER | PFAM: 7 transmembrane | PF00001 | 58.09 | 233 | 511 |
| | | | 1.8 | receptor (rhodopsin | | | | |
| | | | | family) | | | | |
| | | | blastx.2 | OLFACTORY | sp\|Q9Z231\|Q9Z231 | 61% | 236 | 505 |
| | | | | RECEPTOR | | 52% | 502 | 618 |
| | | | | (FRAGMENT). | | | | |
| HFIDL68 | 928475 | 137 | HMMER | PFAM: 7 transmembrane | PF00001 | 50.42 | 8 | 319 |
| | | | 1.8 | receptor (rhodopsin | | | | |
| | | | | family) | | | | |
| | | | blastx.2 | CG5042 PROTEIN. | sp\|Q9VBP0\|Q9VBP0 | 38% | 8 | 397 |
| HLWFG82 | 1182318 | 138 | blastx.14 | titin [Oryctolagus | gi\|3928489\|emb\|CAA | 45% | 76 | 201 |
| | | | | cuniculus] | 77028.1\| | 37% | 451 | 570 |
| | | | | | | 33% | 454 | 597 |
| | | | | | | 28% | 79 | 216 |
| | | | | | | 32% | 451 | 597 |
| | | | | | | 34% | 112 | 249 |
| | | | | | | 30% | 76 | 201 |
| | | | | | | 30% | 79 | 216 |
| | | | | | | 35% | 79 | 189 |
| | | | | | | 31% | 79 | 192 |
| | | | | | | 30% | 481 | 588 |
| | | | | | | 45% | 304 | 375 |
| | | | | | | 45% | 304 | 369 |
| | | | | | | 34% | 466 | 534 |
| | | | | | | 45% | 304 | 375 |
| | | | | | | 37% | 304 | 375 |
| | | | | | | 43% | 490 | 537 |
| | | | | | | 46% | 451 | 489 |
| | | | | | | 37% | 158 | 205 |
| | | | | | | 34% | 7 | 84 |
| | | | | | | 41% | 474 | 524 |
| HLWFG82 | 929647 | 345 | HMMER | PFAM: Immunoglobulin | PF00047 | 32.6 | 121 | 330 |
| | | | 2.1.1 | domain | | | | |
| | | | blastx.2 | Frazzled [Drosophila | gb\|AAC47314.1\| | 37% | 52 | 411 |
| | | | | melanogaster] | | 43% | 488 | 535 |
| HCHON59 | 931082 | 139 | HMMER | PFAM: SCP-2 sterol | PF02036 | 96.3 | 1006 | 1335 |
| | | | 2.1.1 | transfer family | | | | |
| | | | blastx.2 | CG5590 PROTEIN. | sp\|Q9VB10\|Q9VB10 | 47% | 538 | 1344 |
| | | | | | | 68% | 99 | 536 |
| HEEAR06 | 934722 | 346 | HMMER | PFAM: Immunoglobulin | PF00047 | 22.6 | 219 | 386 |
| | | | 2.1.1 | domain | | | | |
| | | | blastx | myosin binding protein C | gb\|AAC59644.1\| | 37% | 204 | 440 |
| | | | | [Gallus gallus] | | 47% | 22 | 90 |
| | | | | | | 31% | 1 | 132 |
| | | | | | | 45% | 16 | 81 |
| | | | | | | 38% | 106 | 183 |
| HHPTE06 | 1182278 | 141 | blastx.2 | KILON PROTEIN | sp\|Q9Z0J8\|KILO_RA | 95% | 4 | 843 |
| | | | | PRECURSOR | T | | | |
| | | | | (KINDRED OF IGLON). | | | | |
| HHPTE06 | 934755 | 347 | HMMER | PFAM: IG | PF00047 | 18.78 | 20 | 133 |
| | | | 1.8 | (immunoglobulin) | | | | |
| | | | | superfamily | | | | |
| | | | blastx.2 | (AB017139) Kilon [Rattus | dbj\|BAA75649.1\| | 100% | 2 | 172 |
| | | | | norvegicus] | | 100% | 174 | 206 |
| HCHNJ32 | 934848 | 348 | HMMER | PFAM: short chain | PF00106 | 213.6 | 54 | 587 |
| | | | 2.1.1 | dehydrogenase | | | | |
| | | | blastx.2 | CARBONYL | sp\|Q9UHY9\|Q9UHY | 95% | 33 | 764 |
| | | | | REDUCTASE. | 9 | | | |
| HCECQ23 | 938398 | 143 | HMMER | PFAM: CUB domain | PF00431 | 53.7 | 567 | 433 |
| | | | 2.1.1 | | | | | |
| | | | blastx.2 | seizure-related protein | pir\|I52657\|I52657 | 93% | 810 | 370 |
| | | | | SEZ-6 precursor - mouse | | 90% | 335 | 237 |
| | | | | | | 29% | 765 | 370 |
| | | | | | | 35% | 744 | 571 |
| | | | | | | 30% | 747 | 574 |
| | | | | | | 27% | 687 | 484 |
| | | | | | | 27% | 537 | 409 |
| HETIY94 | 1200480 | 144 | blastx.14 | LIPOLYSIS- | sp\|Q9WU75\|Q9WU7 | 42% | 21 | 167 |
| | | | | STIMULATED | 5 | 44% | 483 | 569 |
| | | | | REMNANT RECEPTOR | | 28% | 726 | 860 |
| | | | | ALPHA SUBUNIT. | | 47% | 415 | 465 |
| HETIY94 | 940755 | 349 | HMMER | PFAM: IG | PF00047 | 9.93 | 70 | 123 |
| | | | 1.8 | (immunoglobulin) | | | | |
| | | | | superfamily | | | | |
| | | | blastx | (AF119668) lipolysis- | gb\|AAD30029.1\|AF1 | 53% | 49 | 336 |
| | | | | stimulated remnant | 19668_1 | 52% | 535 | 597 |
| | | | | receptor alpha′ subunit | | | | |
| | | | | [Rattus norvegicus] | | | | |
| HNHCP79 | 941862 | 351 | HMMER | PFAM: 7 transmembrane | PF00001 | 118.47 | 2 | 670 |
| | | | 1.8 | receptor (rhodopsin | | | | |
| | | | | family) | | | | |
| | | | blastx.14 | (AF102533) olfactory | gi\|3983394\|gb\|AAD1 | 55% | 2 | 658 |
| | | | | receptor F7 [Mus | 3325.1\| | | | |
| | | | | musculus] | | | | |
| HE00A49 | 942561 | 146 | HMMER | PFAM: FAD binding | PF01565 | 115.8 | 1 | 201 |
| | | | 2.1.1 | domain | | | | |
| | | | blastx.2 | Aip2p [Saccharomyces | gb\|AAA79142.1\| | 73% | 1 | 252 |
| | | | | cerevisiae] | | 50% | 343 | 549 |
| | | | | | | 42% | 549 | 626 |
| HFKKN77 | 943757 | 147 | HMMER | PFAM: 7 transmembrane | PF00001 | 80.79 | 274 | 573 |
| | | | 1.8 | receptor (rhodopsin | | | | |
| | | | | family) | | | | |
| | | | blastx.2 | G-protein coupled | pir\|JC7289\|JC7289 | 82% | 160 | 714 |
| | | | | receptor, SREB3 - human | | | | |
| HLCMP75 | 1213792 | 148 | blastx.14 | Tumor endothelial marker | sp\|AAG00867\|AAG0 | 92% | 201 | 989 |
| | | | | 1 precursor. | 0867 | 81% | 1059 | 1448 |
| | | | | | | 85% | 126 | 209 |
| | | | | | | 29% | 732 | 989 |
| | | | | | | 43% | 828 | 965 |
| | | | | | | 38% | 810 | 926 |
| | | | | | | 50% | 126 | 209 |
| | | | | | | 38% | 861 | 977 |
| | | | | | | 35% | 126 | 209 |
| | | | | | | 37% | 795 | 899 |
| | | | | | | 29% | 801 | 944 |
| | | | | | | 42% | 132 | 209 |
| | | | | | | 40% | 135 | 209 |
| | | | | | | 42% | 312 | 389 |
| | | | | | | 39% | 757 | 840 |
| | | | | | | 45% | 126 | 191 |
| | | | | | | 25% | 792 | 920 |
| | | | | | | 36% | 678 | 743 |
| | | | | | | 72% | 215 | 247 |
| | | | | | | 28% | 804 | 899 |
| | | | | | | 20% | 816 | 989 |
| | | | | | | 34% | 1001 | 1069 |
| | | | | | | 46% | 153 | 197 |
| | | | | | | 36% | 141 | 197 |
| | | | | | | 50% | 708 | 743 |
| | | | | | | 29% | 849 | 950 |
| | | | | | | 47% | 1013 | 1063 |
| | | | | | | 36% | 1498 | 1563 |
| | | | | | | 41% | 406 | 456 |
| HLCMP75 | 944722 | 352 | HMMER | PFAM: EGF-like domain | PF00008 | 33 | 200 | 304 |
| | | | 2.1.1 | | | | | |
| | | | blastx.2 | Tumor endothelial marker | sp\|AAG00867\|AAG0 | 84% | 14 | 853 |
| | | | | 1 precursor. | 0867 | 63% | 14 | 922 |
| | | | | | | 88% | 852 | 959 |
| | | | | | | 27% | 464 | 922 |
| | | | | | | 26% | 488 | 898 |
| | | | | | | 42% | 182 | 304 |
| | | | | | | 33% | 147 | 236 |
| | | | | | | 29% | 452 | 583 |
| HDTB048 | 945083 | 149 | HMMER | PFAM: IG | PF00047 | 18.53 | 159 | 347 |
| | | | 1.8 | (immunoglobulin) | | | | |
| | | | | superfamily | | | | |
| | | | blastx | (AJ009698) embigin | emb\|CAA08796.1\| | 58% | 132 | 248 |
| | | | | protein [Rattus | 75% | 273 | 356 | |
| | | | | norvegicus] | | 58% | 357 | 464 |
| HWFQR25 | 1133921 | 150 | blastx.14 | Delta 1 [Rattus | gi\|1699046\|gb\|AAB3 | 68% | 85 | 477 |
| | | | | norvegicus] | 7343.1\| | 53% | 469 | 768 |
| | | | | | | 38% | 364 | 711 |
| | | | | | | 41% | 205 | 492 |
| | | | | | | 43% | 475 | 756 |
| | | | | | | 43% | 247 | 474 |
| | | | | | | 56% | 595 | 759 |
| | | | | | | 42% | 466 | 642 |
| | | | | | | 43% | 250 | 408 |
| | | | | | | 43% | 355 | 492 |
| | | | | | | 40% | 85 | 189 |
| | | | | | | 53% | 1293 | 1382 |
| | | | | | | 24% | 604 | 813 |
| | | | | | | 68% | 199 | 246 |
| | | | | | | 47% | 703 | 771 |
| | | | | | | 48% | 1059 | 1139 |
| | | | | | | 40% | 766 | 846 |
| | | | | | | 22% | 97 | 258 |
| | | | | | | 45% | 826 | 891 |
| | | | | | | 44% | 838 | 912 |
| | | | | | | 52% | 832 | 882 |
| | | | | | | 36% | 838 | 903 |
| | | | | | | 66% | 769 | 813 |
| | | | | | | 42% | 109 | 171 |
| | | | | | | 45% | 250 | 309 |
| | | | | | | 32% | 817 | 891 |
| | | | | | | 53% | 604 | 642 |
| | | | | | | 34% | 130 | 198 |
| | | | | | | 25% | 718 | 849 |
| | | | | | | 43% | 769 | 816 |
| | | | | | | 41% | 832 | 882 |
| | | | | | | 27% | 130 | 195 |
| | | | | | | 61% | 202 | 240 |
| | | | | | | 58% | 778 | 813 |
| | | | | | | 31% | 1005 | 1100 |
| | | | | | | 20% | 439 | 573 |
| | | | | | | 23% | 751 | 879 |
| | | | | | | 27% | 577 | 684 |
| | | | | | | 60% | 610 | 639 |
| | | | | | | 31% | 1258 | 1323 |
| | | | | | | 46% | 256 | 294 |
| | | | | | | 45% | 373 | 405 |
| | | | | | | 40% | 169 | 213 |
| | | | | | | 38% | 370 | 408 |
| | | | | | | 36% | 349 | 405 |
| HWHQR25 | 947020 | 353 | HMMER | PFAM: EGF-like domain | PF00008 | 102.5 | 113 | 214 |
| | | | 2.1.1 | | | | | |
| | | | blastx.2 | Notch ligand DLL4. | sp\|AAF76427\|AAF76 | 99% | 2 | 538 |
| | | | | | 427 | 41% | 20 | 535 |
| | | | | | | 37% | 2 | 535 |
| | | | | | | 41% | 8 | 481 |
| | | | | | | 35% | 32 | 535 |
| HBGMZ39 | 947112 | 151 | HMMER | PFAM: Cytochrome P450 | PF00067 | 59.5 | 509 | 372 |
| | | | 2.1.1 | | | | | |
| | | | blastx.2 | cytochrome P450 2B - | pir\|JT0676\|JT0676 | 43% | 563 | 372 |
| | | | | green monkey | | 43% | 299 | 168 |
| | | | | | | 40% | 165 | 121 |
| HSDFT51 | 947918 | 354 | HMMER | PFAM: Zinc-binding | PF00099 | 6.14 | 328 | 363 |
| | | | 1.8 | metalloprotease domain | | | | |
| | | | blastx.14 | aminopeptidase-B [Rattus | gi\|1754515\|dbj\|BAA1 | 31% | 94 | 309 |
| | | | | norvegicus] | 3413.1\| | 36% | 289 | 420 |
| HS2SH04 | 947971 | 355 | HMMER | PFAM: Immunoglobulin | PF00047 | 22.5 | 266 | 331 |
| | | | 2.1.1 | domain | | | | |
| | | | blastx | Dutt1 protein [Mus | emb\|CAA76850.1\| | 44% | 116 | 331 |
| | | | | musculus] | | | | |
| HETGL74 | 1065405 | 154 | blastx.14 | FOLLISTATIN-LIKE 2 | sp\|Q61581\|Q61581 | 43% | 273 | 416 |
| | | | | (FOLLISTATIN-LIKE | | 48% | 144 | 254 |
| | | | | PROTEIN). | | | | |
| HETGL74 | 947978 | 356 | HMMER | PFAM: IG | P1700047 | 15.57 | 213 | 392 |
| | | | 1.8 | (immunoglobulin) | | | | |
| | | | | superfamily | | | | |
| | | | blastx.2 | FOLLISTATIN-LIKE 2 | sp\|Q61581\|Q61581 | 36% | 132 | 440 |
| | | | | (FOLLISTATIN-LIKE | | | | |
| | | | | PROTEIN). | | | | |
| HLKAB61 | 948002 | 155 | HMMER | PFAM: EGF-like domain | PF00008 | 30.43 | 159 | 263 |
| | | | 1.8 | | | | | |
| | | | blastx.2 | cell-fate determining gene | pir\|A49128\|A49128 | 86% | 138 | 296 |
| | | | | Notch2 protein - rat | | | | |
| HCEMK49 | 948028 | 357 | HMMER | PFAM: Extracellular link | PF00193 | 92.3 | 237 | 386 |
| | | | 2.1.1 | domain | | | | |
| | | | blastx.2 | brevican precursor - cat | pir\|I46268\|I46268 | 79% | 3 | 401 |
| | | | | | | 81% | 353 | 697 |
| | | | | | | 41% | 353 | 496 |
| HAJAV28 | 948630 | 358 | HMMER | PFAM: Actin | PF00022 | 35.9 | 120 | 230 |
| | | | 2.1.1 | | | | | |
| | | | blastx.2 | Uncharacterized | sp\|AAF67655\|AAF67 | 97% | 96 | 458 |
| | | | | hypothalamus protein | 655 | | | |
| | | | | HARP11. | | | | |
| HETBR74 | 948667 | 158 | HMMER | PFAM: Rhodanese-like | PF00581 | 32.2 | 321 | 461 |
| | | | 2.1.1 | domain | | | | |
| | | | blastx.2 | DUAL SPECIFICITY | sp\|O09112\|DUS8_M | 42% | 291 | 476 |
| | | | | PROTEIN | OUSE | 54% | 458 | 523 |
| | | | | PHOSPHATASE 8 (EC | | 55% | 535 | 588 |
| | | | | 3.1.3.48) (EC 1 | | | | |
| HSDJM56 | 948669 | 159 | HMMER | PFAM: Zinc-binding | PF00099 | 6.46 | 114 | 149 |
| | | | 1.8 | metalloprotease domain | | | | |
| | | | blastx.2 | formate C- | pir\|S01788\|S01788 | 99% | 811 | 395 |
| | | | | acetyltransferase (EC | | 99% | 395 | 3 |
| | | | | 2.3.1.54) 1 - Escherichia | | | | |
| | | | | coli | | | | |
| HCWEI19 | 1137795 | 160 | blastx.14 | formaldehyde | gi\|887431\|emb\|CAA5 | 93% | 231 | 10 |
| | | | | dehydrogenase | 2057.1\| | | | |
| | | | | (glutathione) [Escherichia | | | | |
| | | | | coli] | | | | |
| HCWEI19 | 948690 | 359 | HMMER | PFAM: Zinc-binding | PF00099 | 8.6 | 226 | 273 |
| | | | 1.8 | metalloprotease domain | | | | |
| | | | blastx.14 | formaldehyde | gi\|887431\|emb\|CAA5 | 75% | 300 | 10 |
| | | | | dehydrogenase | 2057.1\| | | | |
| | | | | (glutathione) [Escherichia | | | | |
| | | | | coli] | | | | |
| HLDOA63 | 1174795 | 161 | blastx.14 | complement component | gi\|179665\|gb\|AAA85 | 33% | 190 | 507 |
| | | | | C3 [Homo sapiens] | 332.1\| | 47% | 115 | 222 |
| | | | | | | 42% | 65 | 106 |
| HLDOA63 | 949166 | 360 | HMMER | PFAM: NTR/C345C | PF01759 | 34.1 | 144 | 323 |
| | | | 2.1.1 | module | | | | |
| | | | blastx.2 | complement C3 protein | gb\|AAA37038.1\| | 35% | 72 | 449 |
| | | | | (GPC3) precursor [Cavia | | | | |
| | | | | porcellus] | | | | |
| HSSGK13 | 1138016 | 162 | blastx.14 | alpha-1-macroglobulin | gi\|202857\|gb\|AAA40 | 44% | 252 | 539 |
| | | | | [Rattus norvegicus] | 723.1\| | 70% | 156 | 185 |
| | | | | | | 38% | 185 | 286 |
| HSSGK13 | 949181 | 361 | HMMER | PFAM: Alpha-2- | PF00207 | 48.52 | 150 | 524 |
| | | | 1.8 | macroglobulin family | | | | |
| | | | blastx.2 | ovomacroglobulin, | emb\|CAA55384.1\| | 45% | 153 | 533 |
| | | | | ovostatin [Gallus gallus] | | | | |
| HTJND16 | 1137767 | 163 | blastx.14 | alpha-1 inhibitor III | gi\|202570\|gb\|AAA40 | 40% | 1019 | 1549 |
| | | | | [Rattus sordidus] | 627.1\| | 58% | 8 | 331 |
| | | | | | | 54% | 323 | 613 |
| | | | | | | 48% | 854 | 1015 |
| | | | | | | 39% | 632 | 820 |
| | | | | | | 43% | 755 | 850 |
| | | | | | | 27% | 818 | 946 |
| | | | | | | 26% | 565 | 633 |
| HTJND16 | 949188 | 362 | HMMER | PFAM: Alpha-2- | PF00207 | 273.5 | 1 | 840 |
| | | | 2.1.1 | macroglobulin family | | | | |
| | | | blastx.2 | alpha-1 inhibitor III | gb\|AAA40627.1\| | 49% | 1 | 870 |
| | | | | [Rattus sordidus] | | 38% | 873 | 1136 |
| HEQAP17 | 949358 | 164 | HMMER | PFAM: 7 transmembrane | PF00001 | 94.57 | 741 | 436 |
| | | | 1.8 | receptor (rhodopsin | | | | |
| | | | | family) | | | | |
| | | | blastx.2 | Orphan seven- | sp\|AAF59827\|AAF59 | 84% | 786 | 295 |
| | | | | transmembrane receptor. | 827 | | | |
| HNTOA59 | 950297 | 363 | HMMER | PFAM: CUB domain | PF00431 | 123.5 | 3 | 287 |
| | | | 2.1.1 | | | | | |
| | | | blastx.2 | (AF067619) contains | gb\|AAC17565.1\| | 32% | 3 | 695 |
| | | | | similarity to CUB | | | | |
| | | | | domains (Pfam; CUB, | | | | |
| | | | | score; 101.9 and 42.78) | | | | |
| | | | | [Caenorhabditis elegans] | | | | |
| HE8AZ89 | 1007929 | 166 | blastx.14 | (AL109739) trna | gi\|5706516\|emb\|CAB | 50% | 80 | 271 |
| | | | | isopentenyltransferase | 52278.1\| | 39% | 248 | 406 |
| | | | | [Schizosaccharomyces | | 38% | 479 | 628 |
| | | | | pombe] | | | | |
| HE8AZ89 | 950713 | 364 | HMMER | PFAM: IPP transferase | PF01715 | 143.2 | 179 | 628 |
| | | | 2.1.1 | | | | | |
| | | | blastx.2 | trna | pir\|T38664\|T38664 | 38% | 80 | 628 |
| | | | | isopentenyltransferase - | | | | |
| | | | | fission yeast | | | | |
| | | | | (Schizosaccharomyces | | | | |
| | | | | pombe) | | | | |
| HNGE079 | 1126318 | 167 | blastx.14 | (AF143185) high affinity | gi\|4973136\|gb\|AAD3 | 54% | 191 | 289 |
| | | | | immunoglobulin 1 | 4946.1\|AF143185_1 | 41% | 308 | 424 |
| | | | | | | 77% | 134 | 187 |
| | | | | | | 31% | 1405 | 1500 |
| | | | | | | 36% | 44 | 118 |
| HNGE079 | 951489 | 365 | HMMER | PFAM: IG | PF00047 | 33.71 | 290 | 466 |
| | | | 1.8 | (immunoglobulin) | | | | |
| | | | | superfamily | | | | |
| | | | blastx | (AF143185) high affinity | gb\|AAD34946.1\|AF1 | 54% | 287 | 385 |
| | | | | immunoglobulin gamma | 43185_1 | | | |
| | | | | Fc 1 | | 41% | 404 | 520 |
| | | | | | | 77% | 230 | 283 |
| | | | | | | 36% | 140 | 214 |
| HDPIX67 | 954385 | 366 | HMMER | PFAM: Queuine tRNA- | PF01702 | 40.7 | 86 | 325 |
| | | | 2.1.1 | ribosyltransferase | | | | |
| | | | blastx.14 | (AE000733) queuine | gi\|2983726\|gb\|AAC0 | 35% | 86 | 313 |
| | | | | tRNA-ribosyltransferase | 7288.1\| | | | |
| | | | | [Aquifex aeolicus] | | | | |
| HWLLB11 | 954849 | 169 | HMMER | PFAM: Cytochrome P450 | PF00067 | 159.13 | 75 | 506 |
| | | | 1.8 | | | | | |
| | | | blastx.2 | CYTOCHROME P450 | sp\|Q9VA27\|Q9VA27 | 46% | 78 | 512 |
| | | | | 4C3 (EC 1.14.14.1) | | 44% | 4 | 75 |
| | | | | (CYPIVC3). | | | | |
| HNTEF53 | 954852 | 170 | HMMER | PFAM: Cytochrome P450 | PF00067 | 102.61 | 369 | 887 |
| | | | 1.8 | | | | | |
| | | | blastx.2 | prostaglandin omega- | pir\|S32315\|A29368 | 49% | 821 | 1714 |
| | | | | hydroxylase (EC 1.14.15.-) | | 42% | 279 | 902 |
| | | | | cytochrome 1 | | 60% | 1705 | 1749 |
| HNTND64 | 954871 | 171 | HMMER | PFAM: Cytochrome P450 | PF00067 | 28.2 | 10 | 225 |
| | | | 2.1.1 | | | | | |
| | | | blastx.2 | cytochrome P450 - golden | pir\|I48164\|I48164 | 37% | 10 | 264 |
| | | | | hamster | | 47% | 261 | 329 |
| HFPFA83 | 955614 | 172 | HMMER | PFAM: 7 transmembrane | PF00001 | 107.6 | 316 | 681 |
| | | | 1.8 | receptor (rhodopsin | | | | |
| | | | | family) | | | | |
| | | | blastx.2 | G-protein coupled | pir\|JC7289\|JC7289 | 98% | 202 | 735 |
| | | | | receptor, SREB3 - human | | | | |
| HFIZB56 | 955618 | 173 | HMMER | PFAM: EGF-like domain | PF00008 | 112.1 | 312 | 407 |
| | | | 2.1.1 | | | | | |
| | | | blastx.2 | FIBROPELLIN III | sp\|Q25059\|Q25059 | 56% | 3 | 410 |
| | | | | (FRAGMENT). | | 48% | 3 | 416 |
| | | | | | | 49% | 3 | 410 |
| | | | | | | 45% | 3 | 470 |
| | | | | | | 48% | 42 | 416 |
| HFPHR82 | 957528 | 174 | HMMER | PFAM: Actin | PF00022 | 91.7 | 1322 | 357 |
| | | | 2.1.1 | | | | | |
| | | | blastx.2 | Uncharacterized | sp\|AAF67655\|AAF67 | 100% | 1523 | 273 |
| | | | | hypothalamus protein | 655 | | | |
| | | | | HARP11. | | | | |
| HBCBT19 | 959953 | 175 | HMMER | PFAM: short chain | PF00106 | 30.7 | 202 | 417 |
| | | | 2.1.1 | dehydrogenase | | | | |
| | | | blastx.2 | hypothetical protein | pir\|T04022\|T04022 | 40% | 214 | 552 |
| | | | | F17A8.100 - Arabidopsis | | 41% | 38 | 196 |
| | | | | thaliana | | 52% | 591 | 653 |
| HMCFA91 | 959954 | 176 | HMMER | PFAM: Alcohol/other | PF00106 | 25.77 | 19 | 282 |
| | | | 1.8 | dehydrogenases, short | | | | |
| | | | | chain type | | | | |
| | | | blastx.2 | hypothetical protein | pir\|T04022\|T04022 | 53% | 367 | 648 |
| | | | | F17A8.100 - Arabidopsis | | 41% | 1 | 282 |
| | | | | thaliania | | | | |
| HTEJB14 | 1128044 | 177 | blastx.14 | Bowel [Drosophila | gi\|1388166\|gb\|AAB1 | 90% | 10 | 237 |
| | | | | melanogaster] | 7949.1\| | 34% | 4 | 231 |
| | | | | | | 80% | 228 | 317 |
| | | | | | | 33% | 10 | 231 |
| | | | | | | 46% | 10 | 150 |
| | | | | | | 28% | 55 | 231 |
| | | | | | | 31% | 231 | 335 |
| | | | | | | 35% | 225 | 317 |
| | | | | | | 32% | 308 | 382 |
| | | | | | | 32% | 298 | 381 |
| | | | | | | 29% | 315 | 407 |
| HTEIB14 | 963099 | 367 | HMMER | PFAM: Zinc finger, C2H2 | PF00096 | 53.9 | 78 | 146 |
| | | | 2.1.1 | type | | | | |
| | | | blastx.14 | Bowel [Drosophila | gi\|1388166\|gb\|AAB1 | 90% | 9 | 236 |
| | | | | melanogaster] | 7949.1\| | 33% | 9 | 230 |
| | | | | | | 80% | 227 | 316 |
| | | | | | | 33% | 9 | 230 |
| | | | | | | 46% | 9 | 149 |
| | | | | | | 28% | 54 | 230 |
| | | | | | | 31% | 230 | 334 |
| | | | | | | 35% | 224 | 316 |
| | | | | | | 32% | 307 | 381 |
| | | | | | | 32% | 297 | 380 |
| | | | | | | 34% | 358 | 426 |
| HEAAA42 | 1128009 | 178 | blastx.14 | Bowel [Drosophila | gi\|1388166\|gb\|AAB1 | 88% | 96 | 356 |
| | | | | melanogaster] | 7949.1\| | 34% | 105 | 350 |
| | | | | | | 31% | 105 | 350 |
| | | | | | | 80% | 347 | 436 |
| | | | | | | 46% | 120 | 269 |
| | | | | | | 28% | 174 | 350 |
| | | | | | | 31% | 350 | 454 |
| | | | | | | 35% | 344 | 436 |
| | | | | | | 32% | 427 | 501 |
| | | | | | | 29% | 434 | 526 |
| | | | | | | 32% | 417 | 500 |
| HEAAA42 | 963100 | 368 | HMMER | PFAM: Zinc finger, C2H2 | PF00096 | 20.88 | 114 | 176 |
| | | | 1.8 | type | | | | |
| | | | blastx.2 | (AF117814) odd-skipped | gb\|AAD37115.1\|AF1 | 79% | 18 | 221 |
| | | | | related 1 protein [Mus | 17814_1 | | | |
| | | | | musculus] | | | | |
| HTTFZ40 | 964697 | 369 | HMMER | PFAM: Alpha-2- | PF00207 | 46.7 | 356 | 679 |
| | | | 2.1.1 | macroglobulin family | | | | |
| | | | blastx.2 | ovomacroglobulin, | emb\|CAA55384.1\| | 47% | 386 | 706 |
| | | | | ovostatin [Gallus gallus] | | | | |
| HSODC08 | 1189493 | 180 | blastx.14 | conserved hypothetical | gi\|1591006\|gb\|AAB9 | 41% | 848 | 1036 |
| | | | | protein [Methanococcus | 8269.1\| | 41% | 689 | 781 |
| | | | | jannaschii) | | 88% | 605 | 631 |
| | | | | | | 36% | 626 | 682 |
| HSODC08 | 966264 | 370 | HMMER | PFAM: Zinc-binding | PF00099 | 14.78 | 551 | 510 |
| | | | 1.8 | metalloprotease domain | | | | |
| | | | blastx.2 | BM-014. | sp\|AAF64270\|AAF64 | 94% | 779 | 222 |
| | | | | | 270 | | | |
| HAHHE43 | 966830 | 371 | HMMER | PFAM: Zinc-binding | PF00099 | 4.22 | 275 | 322 |
| | | | 1.8 | metalloprotease domain | | | | |
| HWMES65 | 1126347 | 182 | blastx.14 | (AB010921) Membrane- | gi\|4126377\|dbj\|BAA3 | 44% | 125 | 259 |
| | | | | type matrix | 6551.1\| | 39% | 669 | 782 |
| | | | | metalloproteinase-1 | | 31% | 600 | 740 |
| | | | | [Capra hircus] | | 28% | 735 | 830 |
| | | | | | | 57% | 11 | 67 |
| | | | | | | 45% | 600 | 665 |
| | | | | | | 38% | 717 | 770 |
| | | | | | | 44% | 509 | 562 |
| | | | | | | 32% | 365 | 439 |
| | | | | | | 46% | 74 | 112 |
| | | | | | | 28% | 530 | 604 |
| | | | | | | 57% | 563 | 604 |
| | | | | | | 44% | 551 | 604 |
| | | | | | | 27% | 832 | 897 |
| | | | | | | 38% | 446 | 484 |
| | | | | | | 35% | 254 | 313 |
| | | | | | | 40% | 452 | 481 |
| HWMES65 | 969190 | 372 | HMMER | PFAM: Matrixin | PF00413 | 45.6 | 17 | 109 |
| | | | 2.1.1 | | | | | |
| | | | blastx.2 | HATCHING ENZYME | sp\|P91953\|HE_HEM | 51% | 2 | 304 |
| | | | | PRECURSOR (EC | PU | | | |
| | | | | 3.4.24.12) (HE) (HEZ) 1 | | | | |
| HE8NI24 | 971296 | 183 | HMMER | PFAM: 7 transmembrane | PF00001 | 61.74 | 453 | 707 |
| | | | 1.8 | receptor (rhodopsin | | | | |
| | | | | family) | | | | |
| | | | blastx.2 | G-protein coupled | pir\|T47131\|T47131 | 93% | 345 | 707 |
| | | | | receptor, SREB2 - human | | 88% | 722 | 748 |
| HHATR09 | 1126363 | 184 | blastx.14 | predicted protein contains | gi\|3875955\|emb\|CAA | 30% | 127 | 465 |
| | | | | a large number of Ig 1 1 | 87335.1\| | 37% | 178 | 441 |
| | | | | comes from this gene; | | 31% | 463 | 729 |
| | | | | cDNA EST yk248d7.3 | | 32% | 202 | 453 |
| | | | | comes from this gene; c | | 34% | 196 | 447 |
| | | | | | | 31% | 196 | 480 |
| | | | | | | 41% | 664 | 843 |
| | | | | | | 37% | 664 | 846 |
| | | | | | | 29% | 619 | 840 |
| | | | | | | 34% | 643 | 840 |
| | | | | | | 35% | 664 | 849 |
| | | | | | | 22% | 73 | 441 |
| | | | | | | 27% | 163 | 441 |
| | | | | | | 46% | 451 | 606 |
| | | | | | | 29% | 181 | 432 |
| | | | | | | 42% | 457 | 633 |
| | | | | | | 28% | 412 | 630 |
| | | | | | | 40% | 463 | 603 |
| | | | | | | 38% | 664 | 840 |
| | | | | | | 38% | 178 | 324 |
| | | | | | | 33% | 655 | 849 |
| | | | | | | 37% | 655 | 840 |
| | | | | | | 33% | 481 | 684 |
| | | | | | | 40% | 166 | 315 |
| | | | | | | 27% | 643 | 840 |
| | | | | | | 25% | 184 | 456 |
| | | | | | | 39% | 178 | 321 |
| | | | | | | 50% | 85 | 180 |
| | | | | | | 40% | 196 | 327 |
| | | | | | | 33% | 682 | 840 |
| | | | | | | 35% | 697 | 840 |
| | | | | | | 36% | 451 | 600 |
| | | | | | | 41% | 469 | 606 |
| | | | | | | 42% | 457 | 606 |
| | | | | | | 39% | 178 | 321 |
| | | | | | | 44% | 478 | 606 |
| | | | | | | 56% | 79 | 168 |
| | | | | | | 36% | 460 | 600 |
| | | | | | | 35% | 454 | 606 |
| | | | | | | 39% | 463 | 606 |
| | | | | | | 43% | 337 | 459 |
| | | | | | | 30% | 451 | 639 |
| | | | | | | 32% | 157 | 324 |
| | | | | | | 37% | 196 | 324 |
| | | | | | | 35% | 454 | 606 |
| | | | | | | 38% | 466 | 606 |
| | | | | | | 34% | 460 | 615 |
| | | | | | | 32% | 445 | 600 |
| | | | | | | 38% | 451 | 606 |
| | | | | | | 34% | 190 | 327 |
| | | | | | | 42% | 490 | 603 |
| | | | | | | 30% | 619 | 774 |
| | | | | | | 27% | 235 | 438 |
| | | | | | | 41% | 340 | 441 |
| | | | | | | 35% | 199 | 333 |
| | | | | | | 34% | 193 | 330 |
| | | | | | | 33% | 73 | 180 |
| | | | | | | 40% | 466 | 600 |
| | | | | | | 35% | 439 | 609 |
| | | | | | | 42% | 328 | 441 |
| | | | | | | 41% | 478 | 606 |
| | | | | | | 43% | 490 | 606 |
| | | | | | | 36% | 487 | 624 |
| | | | | | | 40% | 349 | 438 |
| | | | | | | 50% | 358 | 441 |
| | | | | | | 37% | 466 | 594 |
| | | | | | | 44% | 85 | 165 |
| | | | | | | 30% | 196 | 321 |
| | | | | | | 46% | 352 | 435 |
| | | | | | | 40% | 352 | 447 |
| | | | | | | 33% | 343 | 441 |
| | | | | | | 27% | 205 | 357 |
| | | | | | | 45% | 655 | 747 |
| | | | | | | 37% | 328 | 432 |
| | | | | | | 31% | 637 | 759 |
| | | | | | | 37% | 73 | 207 |
| | | | | | | 32% | 160 | 315 |
| | | | | | | 37% | 331 | 492 |
| | | | | | | 48% | 343 | 429 |
| | | | | | | 42% | 331 | 435 |
| | | | | | | 40% | 730 | 840 |
| | | | | | | 23% | 622 | 849 |
| | | | | | | 25% | 199 | 351 |
| | | | | | | 23% | 619 | 771 |
| | | | | | | 21% | 52 | 315 |
| | | | | | | 34% | 457 | 606 |
| | | | | | | 28% | 205 | 384 |
| | | | | | | 28% | 166 | 321 |
| | | | | | | 28% | 478 | 645 |
| | | | | | | 32% | 478 | 624 |
| | | | | | | 25% | 448 | 609 |
| | | | | | | 57% | 664 | 720 |
| | | | | | | 39% | 484 | 606 |
| | | | | | | 35% | 646 | 729 |
| | | | | | | 55% | 85 | 144 |
| | | | | | | 35% | 625 | 726 |
| | | | | | | 54% | 85 | 156 |
| | | | | | | 27% | 76 | 237 |
| | | | | | | 39% | 745 | 843 |
| | | | | | | 37% | 199 | 303 |
| | | | | | | 36% | 76 | 165 |
| | | | | | | 50% | 394 | 465 |
| | | | | | | 35% | 478 | 603 |
| | | | | | | 36% | 73 | 171 |
| | | | | | | 36% | 478 | 609 |
| | | | | | | 31% | 487 | 609 |
| | | | | | | 34% | 205 | 318 |
| | | | | | | 32% | 340 | 450 |
| | | | | | | 33% | 205 | 321 |
| | | | | | | 53% | 772 | 849 |
| | | | | | | 33% | 733 | 840 |
| | | | | | | 41% | 655 | 741 |
| | | | | | | 38% | 178 | 279 |
| | | | | | | 33% | 352 | 450 |
| | | | | | | 38% | 361 | 453 |
| | | | | | | 38% | 205 | 321 |
| | | | | | | 32% | 202 | 321 |
| | | | | | | 28% | 178 | 324 |
| | | | | | | 34% | 745 | 840 |
| | | | | | | 31% | 616 | 720 |
| | | | | | | 35% | 205 | 321 |
| | | | | | | 45% | 655 | 720 |
| | | | | | | 42% | 742 | 840 |
| | | | | | | 39% | 337 | 435 |
| | | | | | | 45% | 370 | 441 |
| | | | | | | 50% | 361 | 420 |
| | | | | | | 40% | 79 | 159 |
| | | | | | | 38% | 739 | 840 |
| | | | | | | 32% | 628 | 720 |
| | | | | | | 42% | 481 | 564 |
| | | | | | | 43% | 772 | 840 |
| | | | | | | 46% | 511 | 588 |
| | | | | | | 39% | 91 | 159 |
| | | | | | | 58% | 85 | 135 |
| | | | | | | 42% | 658 | 720 |
| | | | | | | 35% | 739 | 840 |
| | | | | | | 33% | 109 | 180 |
| | | | | | | 38% | 655 | 717 |
| | | | | | | 30% | 508 | 624 |
| | | | | | | 38% | 82 | 159 |
| | | | | | | 47% | 88 | 150 |
| | | | | | | 45% | 91 | 156 |
| | | | | | | 42% | 763 | 840 |
| | | | | | | 36% | 517 | 606 |
| | | | | | | 35% | 73 | 165 |
| | | | | | | 30% | 487 | 606 |
| | | | | | | 22% | 352 | 495 |
| | | | | | | 29% | 76 | 156 |
| | | | | | | 35% | 229 | 321 |
| | | | | | | 33% | 361 | 441 |
| | | | | | | 40% | 658 | 717 |
| | | | | | | 45% | 769 | 840 |
| | | | | | | 39% | 643 | 726 |
| | | | | | | 36% | 490 | 588 |
| | | | | | | 48% | 517 | 591 |
| | | | | | | 25% | 88 | 228 |
| | | | | | | 27% | 76 | 162 |
| | | | | | | 31% | 85 | 180 |
| | | | | | | 23% | 652 | 792 |
| | | | | | | 52% | 91 | 141 |
| | | | | | | 42% | 88 | 144 |
| | | | | | | 31% | 205 | 318 |
| | | | | | | 40% | 772 | 846 |
| | | | | | | 40% | 85 | 159 |
| | | | | | | 32% | 355 | 447 |
| | | | | | | 30% | 85 | 162 |
| | | | | | | 26% | 187 | 324 |
| | | | | | | 50% | 793 | 840 |
| | | | | | | 21% | 184 | 321 |
| | | | | | | 38% | 658 | 720 |
| | | | | | | 56% | 682 | 729 |
| | | | | | | 40% | 76 | 150 |
| | | | | | | 34% | 85 | 162 |
| | | | | | | 27% | 349 | 447 |
| | | | | | | 43% | 772 | 840 |
| | | | | | | 38% | 748 | 840 |
| | | | | | | 30% | 766 | 843 |
| | | | | | | 28% | 469 | 606 |
| | | | | | | 39% | 661 | 729 |
| | | | | | | 46% | 91 | 135 |
| | | | | | | 72% | 697 | 729 |
| | | | | | | 29% | 358 | 450 |
| | | | | | | 33% | 343 | 450 |
| | | | | | | 20% | 649 | 840 |
| | | | | | | 42% | 778 | 840 |
| | | | | | | 40% | 85 | 144 |
| | | | | | | 50% | 394 | 441 |
| | | | | | | 37% | 85 | 165 |
| | | | | | | 70% | 811 | 840 |
| | | | | | | 42% | 778 | 840 |
| | | | | | | 34% | 772 | 840 |
| | | | | | | 26% | 232 | 321 |
| | | | | | | 38% | 529 | 606 |
| | | | | | | 32% | 514 | 606 |
| | | | | | | 26% | 460 | 606 |
| | | | | | | 28% | 658 | 741 |
| | | | | | | 42% | 778 | 840 |
| | | | | | | 34% | 772 | 840 |
| | | | | | | 40% | 361 | 420 |
| | | | | | | 45% | 109 | 168 |
| | | | | | | 40% | 658 | 732 |
| | | | | | | 53% | 808 | 846 |
| | | | | | | 37% | 313 | 393 |
| | | | | | | 26% | 73 | 141 |
| | | | | | | 37% | 655 | 726 |
| | | | | | | 37% | 196 | 276 |
| | | | | | | 28% | 235 | 318 |
| | | | | | | 30% | 73 | 150 |
| | | | | | | 58% | 796 | 831 |
| | | | | | | 45% | 700 | 732 |
| | | | | | | 46% | 697 | 741 |
| | | | | | | 54% | 808 | 840 |
| | | | | | | 50% | 799 | 834 |
| | | | | | | 35% | 412 | 453 |
| | | | | | | 26% | 739 | 840 |
| | | | | | | 58% | 811 | 846 |
| HHATR09 | 971330 | 373 | HMMER | PFAM: Immunoglobulin | PF00047 | 101.2 | 150 | 332 |
| | | | 2.1.1 | domain | | | | |
| | | | blastx | predicted protein contains | emb\|CAA87335.1\| | 29% | 201 | 539 |
| | | | | a large number of Ig | | 31% | 537 | 803 |
| | | | | superfamily 1 1 gene; | | 36% | 252 | 515 |
| | | | | cDNA EST yk248d7.3 | | 32% | 276 | 527 |
| | | | | comes from this gene; c | | 38% | 738 | 953 |
| | | | | | | 33% | 270 | 521 |
| | | | | | | 30% | 270 | 554 |
| | | | | | | 31% | 738 | 944 |
| | | | | | | 22% | 147 | 515 |
| | | | | | | 33% | 738 | 953 |
| | | | | | | 25% | 693 | 944 |
| | | | | | | 46% | 525 | 680 |
| | | | | | | 29% | 255 | 506 |
| | | | | | | 42% | 531 | 707 |
| | | | | | | 29% | 717 | 953 |
| | | | | | | 26% | 237 | 515 |
| | | | | | | 40% | 537 | 677 |
| | | | | | | 38% | 252 | 398 |
| | | | | | | 31% | 729 | 968 |
| | | | | | | 27% | 486 | 704 |
| | | | | | | 33% | 555 | 758 |
| | | | | | | 40% | 240 | 389 |
| | | | | | | 25% | 258 | 530 |
| | | | | | | 31% | 738 | 944 |
| | | | | | | 39% | 252 | 395 |
| | | | | | | 32% | 729 | 953 |
| | | | | | | 31% | 756 | 944 |
| | | | | | | 50% | 159 | 254 |
| | | | | | | 40% | 270 | 401 |
| | | | | | | 25% | 417 | 674 |
| | | | | | | 24% | 717 | 950 |
| | | | | | | 36% | 525 | 674 |
| | | | | | | 41% | 543 | 680 |
| | | | | | | 42% | 531 | 680 |
| | | | | | | 39% | 252 | 395 |
| | | | | | | 32% | 771 | 944 |
| | | | | | | 44% | 552 | 680 |
| | | | | | | 56% | 153 | 242 |
| | | | | | | 35% | 528 | 680 |
| | | | | | | 36% | 534 | 674 |
| | | | | | | 39% | 537 | 680 |
| | | | | | | 28% | 846 | 1070 |
| | | | | | | 30% | 525 | 713 |
| | | | | | | 32% | 231 | 398 |
| | | | | | | 37% | 270 | 398 |
| | | | | | | 35% | 528 | 680 |
| | | | | | | 38% | 540 | 680 |
| | | | | | | 34% | 534 | 689 |
| | | | | | | 32% | 804 | 980 |
| | | | | | | 38% | 525 | 680 |
| | | | | | | 27% | 309 | 512 |
| | | | | | | 41% | 414 | 515 |
| | | | | | | 34% | 264 | 401 |
| | | | | | | 42% | 564 | 677 |
| | | | | | | 30% | 693 | 848 |
| | | | | | | 41% | 411 | 533 |
| | | | | | | 35% | 273 | 407 |
| | | | | | | 34% | 267 | 404 |
| | | | | | | 40% | 540 | 674 |
| | | | | | | 33% | 147 | 254 |
| | | | | | | 42% | 402 | 515 |
| | | | | | | 35% | 513 | 683 |
| | | | | | | 43% | 564 | 680 |
| | | | | | | 41% | 552 | 680 |
| | | | | | | 36% | 561 | 698 |
| | | | | | | 37% | 540 | 668 |
| | | | | | | 37% | 819 | 953 |
| | | | | | | 44% | 159 | 239 |
| | | | | | | 30% | 270 | 395 |
| | | | | | | 27% | 279 | 431 |
| | | | | | | 45% | 729 | 821 |
| | | | | | | 31% | 711 | 833 |
| | | | | | | 37% | 147 | 281 |
| | | | | | | 32% | 234 | 389 |
| | | | | | | 24% | 696 | 944 |
| | | | | | | 25% | 273 | 425 |
| | | | | | | 23% | 693 | 845 |
| | | | | | | 21% | 126 | 389 |
| | | | | | | 36% | 423 | 512 |
| | | | | | | 46% | 432 | 515 |
| | | | | | | 34% | 531 | 680 |
| | | | | | | 28% | 240 | 395 |
| | | | | | | 32% | 552 | 698 |
| | | | | | | 28% | 279 | 458 |
| | | | | | | 25% | 522 | 683 |
| | | | | | | 28% | 552 | 719 |
| | | | | | | 48% | 417 | 503 |
| | | | | | | 57% | 738 | 794 |
| | | | | | | 39% | 558 | 680 |
| | | | | | | 35% | 720 | 803 |
| | | | | | | 55% | 159 | 218 |
| | | | | | | 42% | 426 | 509 |
| | | | | | | 37% | 426 | 521 |
| | | | | | | 48% | 846 | 944 |
| | | | | | | 54% | 159 | 230 |
| | | | | | | 30% | 417 | 515 |
| | | | | | | 35% | 699 | 800 |
| | | | | | | 27% | 150 | 311 |
| | | | | | | 34% | 402 | 506 |
| | | | | | | 37% | 273 | 377 |
| | | | | | | 36% | 150 | 239 |
| | | | | | | 35% | 552 | 677 |
| | | | | | | 36% | 147 | 245 |
| | | | | | | 36% | 552 | 683 |
| | | | | | | 32% | 414 | 524 |
| | | | | | | 35% | 405 | 566 |
| | | | | | | 40% | 405 | 509 |
| | | | | | | 31% | 561 | 683 |
| | | | | | | 24% | 807 | 953 |
| | | | | | | 34% | 279 | 392 |
| | | | | | | 38% | 435 | 527 |
| | | | | | | 33% | 279 | 395 |
| | | | | | | 41% | 729 | 815 |
| | | | | | | 38% | 252 | 353 |
| | | | | | | 38% | 279 | 395 |
| | | | | | | 32% | 276 | 395 |
| | | | | | | 39% | 411 | 509 |
| | | | | | | 28% | 252 | 398 |
| | | | | | | 45% | 444 | 515 |
| | | | | | | 31% | 813 | 953 |
| | | | | | | 31% | 690 | 794 |
| | | | | | | 35% | 279 | 395 |
| | | | | | | 45% | 729 | 794 |
| | | | | | | 33% | 426 | 524 |
| | | | | | | 45% | 468 | 539 |
| | | | | | | 50% | 435 | 494 |
| | | | | | | 40% | 153 | 233 |
| | | | | | | 31% | 816 | 947 |
| | | | | | | 32% | 702 | 794 |
| | | | | | | 42% | 555 | 638 |
| | | | | | | 46% | 585 | 662 |
| | | | | | | 39% | 165 | 233 |
| | | | | | | 58% | 159 | 209 |
| | | | | | | 42% | 732 | 794 |
| | | | | | | 33% | 183 | 254 |
| | | | | | | 38% | 729 | 791 |
| | | | | | | 30% | 582 | 698 |
| | | | | | | 47% | 162 | 224 |
| | | | | | | 38% | 156 | 233 |
| | | | | | | 45% | 165 | 230 |
| | | | | | | 35% | 147 | 239 |
| | | | | | | 36% | 591 | 680 |
| | | | | | | 30% | 561 | 680 |
| | | | | | | 29% | 150 | 230 |
| | | | | | | 35% | 303 | 395 |
| | | | | | | 40% | 732 | 791 |
| | | | | | | 39% | 717 | 800 |
| | | | | | | 36% | 564 | 662 |
| | | | | | | 48% | 591 | 665 |
| | | | | | | 25% | 162 | 302 |
| | | | | | | 27% | 150 | 236 |
| | | | | | | 31% | 159 | 254 |
| | | | | | | 37% | 885 | 971 |
| | | | | | | 23% | 726 | 866 |
| | | | | | | 42% | 162 | 218 |
| | | | | | | 52% | 165 | 215 |
| | | | | | | 32% | 429 | 521 |
| | | | | | | 31% | 279 | 392 |
| | | | | | | 40% | 159 | 233 |
| | | | | | | 22% | 426 | 569 |
| | | | | | | 26% | 261 | 398 |
| | | | | | | 30% | 159 | 236 |
| | | | | | | 33% | 435 | 515 |
| | | | | | | 23% | 867 | 995 |
| | | | | | | 21% | 258 | 395 |
| | | | | | | 38% | 732 | 794 |
| | | | | | | 56% | 756 | 803 |
| | | | | | | 40% | 150 | 224 |
| | | | | | | 34% | 159 | 236 |
| | | | | | | 28% | 840 | 944 |
| | | | | | | 28% | 543 | 680 |
| | | | | | | 39% | 735 | 803 |
| | | | | | | 46% | 165 | 209 |
| | | | | | | 34% | 843 | 947 |
| | | | | | | 72% | 771 | 803 |
| | | | | | | 40% | 159 | 218 |
| | | | | | | 27% | 423 | 521 |
| | | | | | | 37% | 159 | 239 |
| | | | | | | 26% | 852 | 989 |
| | | | | | | 26% | 306 | 395 |
| | | | | | | 38% | 603 | 680 |
| | | | | | | 32% | 588 | 680 |
| | | | | | | 33% | 846 | 944 |
| | | | | | | 26% | 534 | 680 |
| | | | | | | 28% | 732 | 815 |
| | | | | | | 33% | 417 | 524 |
| | | | | | | 45% | 183 | 242 |
| | | | | | | 40% | 435 | 494 |
| | | | | | | 30% | 846 | 944 |
| | | | | | | 40% | 732 | 806 |
| | | | | | | 25% | 432 | 524 |
| | | | | | | 32% | 852 | 944 |
| | | | | | | 26% | 147 | 215 |
| | | | | | | 37% | 387 | 467 |
| | | | | | | 37% | 729 | 800 |
| | | | | | | 43% | 468 | 515 |
| | | | | | | 37% | 270 | 350 |
| | | | | | | 28% | 309 | 392 |
| | | | | | | 30% | 882 | 959 |
| | | | | | | 30% | 147 | 224 |
| | | | | | | 45% | 774 | 806 |
| | | | | | | 46% | 771 | 815 |
| HNTAR65 | 971373 | 374 | HMMER | PFAM: Immunoglobulin | PF00047 | 77.1 | 925 | 1128 |
| | | | 2.1.1 | domain | | | | |
| | | | blastx | (AK001707) unnamed | dbj\|BAA91850.1\| | 98% | 1054 | 1683 |
| | | | | protein product [Homo | | | | |
| | | | | sapiens] | | | | |
| HYABP53 | 971448 | 375 | HMMER | PFAM: Immunoglobulin | PF00047 | 27.8 | 257 | 427 |
| | | | 2.1.1 | domain | | | | |
| HSXBV89 | 971821 | 376 | HMMER | PFAM: Sushi domain | PF00084 | 43.6 | 123 | 290 |
| | | | 2.1.1 | (SCR repeat) | | | | |
| | | | blastx.2 | TYPE I | sp\|Q9UJ47\|Q9UJ47 | 82% | 3 | 635 |
| | | | | TRANSMEMBRANE | | 32% | 96 | 536 |
| | | | | RECEPTOR | | | | |
| | | | | PRECURSOR. | | | | |
| HPTZB93 | 971842 | 188 | HMMER | PFAM: EGF-like domain | PF00008 | 20.4 | 562 | 491 |
| | | | 1.8 | | | | | |
| | | | blastx.2 | CRIPTO, FRL-1, | sp\|P97766\|P97766 | 55% | 820 | 344 |
| | | | | CRYPTIC FAMILY 1. | | | | |
| HTSHM38 | 1130648 | 189 | blastx.14 | (AB011532) MEGF6 | gi\|3449294\|dbj\|BAA3 | 88% | 288 | 539 |
| | | | | [Rattus norvegicus] | 2462.1\| | 50% | 279 | 461 |
| | | | | | | 72% | 1269 | 1388 |
| | | | | | | 53% | 321 | 467 |
| | | | | | | 42% | 300 | 461 |
| | | | | | | 42% | 288 | 443 |
| | | | | | | 43% | 291 | 428 |
| | | | | | | 40% | 342 | 482 |
| | | | | | | 46% | 288 | 416 |
| | | | | | | 75% | 111 | 182 |
| | | | | | | 44% | 1278 | 1385 |
| | | | | | | 44% | 1278 | 1385 |
| | | | | | | 45% | 1278 | 1388 |
| | | | | | | 38% | 1278 | 1385 |
| | | | | | | 38% | 1278 | 1385 |
| | | | | | | 66% | 414 | 458 |
| | | | | | | 40% | 1299 | 1388 |
| | | | | | | 50% | 468 | 533 |
| | | | | | | 50% | 1335 | 1400 |
| | | | | | | 61% | 246 | 284 |
| | | | | | | 35% | 189 | 281 |
| | | | | | | 47% | 483 | 539 |
| | | | | | | 52% | 246 | 296 |
| | | | | | | 39% | 477 | 545 |
| | | | | | | 61% | 246 | 284 |
| | | | | | | 31% | 189 | 284 |
| | | | | | | 50% | 246 | 287 |
| | | | | | | 55% | 231 | 284 |
| | | | | | | 69% | 246 | 284 |
| | | | | | | 53% | 246 | 284 |
| | | | | | | 50% | 486 | 533 |
| | | | | | | 35% | 453 | 536 |
| | | | | | | 29% | 171 | 281 |
| | | | | | | 47% | 483 | 533 |
| | | | | | | 47% | 483 | 533 |
| | | | | | | 50% | 246 | 305 |
| | | | | | | 31% | 300 | 413 |
| | | | | | | 70% | 252 | 281 |
| | | | | | | 58% | 252 | 287 |
| | | | | | | 30% | 435 | 533 |
| | | | | | | 58% | 246 | 281 |
| | | | | | | 53% | 246 | 284 |
| | | | | | | 40% | 1311 | 1385 |
| | | | | | | 63% | 318 | 350 |
| | | | | | | 75% | 246 | 269 |
| | | | | | | 50% | 1272 | 1313 |
| | | | | | | 47% | 246 | 296 |
| | | | | | | 37% | 252 | 323 |
| | | | | | | 54% | 252 | 284 |
| | | | | | | 70% | 201 | 230 |
| | | | | | | 31% | 321 | 407 |
| | | | | | | 70% | 858 | 887 |
| | | | | | | 36% | 231 | 287 |
| | | | | | | 30% | 1299 | 1376 |
| | | | | | | 33% | 486 | 557 |
| | | | | | | 40% | 402 | 461 |
| | | | | | | 60% | 204 | 233 |
| | | | | | | 33% | 1105 | 1167 |
| | | | | | | 54% | 474 | 506 |
| | | | | | | 50% | 246 | 281 |
| | | | | | | 34% | 309 | 377 |
| | | | | | | 25% | 330 | 446 |
| | | | | | | 62% | 246 | 269 |
| | | | | | | 35% | 474 | 557 |
| | | | | | | 24% | 297 | 407 |
| | | | | | | 50% | 228 | 263 |
| | | | | | | 29% | 252 | 344 |
| | | | | | | 46% | 1132 | 1176 |
| | | | | | | 55% | 1329 | 1355 |
| | | | | | | 25% | 1278 | 1358 |
| | | | | | | 71% | 486 | 506 |
| | | | | | | 33% | 345 | 407 |
| | | | | | | 71% | 360 | 380 |
| | | | | | | 50% | 246 | 281 |
| HTSHM38 | 972248 | 377 | HMMER | PFAM: EGF-like domain | PF00008 | 72 | 299 | 406 |
| | | | 2.1.1 | | | | | |
| | | | blastx.2 | MEGF6 protein - rat | pir\|T13954\|T13954 | 70% | 185 | 556 |
| | | | | | | 46% | 218 | 556 |
| | | | | | | 43% | 179 | 532 |
| | | | | | | 43% | 182 | 535 |
| | | | | | | 37% | 173 | 538 |
| | | | | | | 37% | 185 | 550 |
| | | | | | | 35% | 185 | 442 |
| | | | | | | 34% | 170 | 544 |
| | | | | | | 35% | 149 | 544 |
| | | | | | | 35% | 188 | 571 |
| | | | | | | 35% | 203 | 550 |
| | | | | | | 36% | 188 | 544 |
| | | | | | | 65% | 105 | 173 |
| | | | | | | 47% | 430 | 483 |
| HLDQK77 | 1169219 | 190 | blastx.14 | (AF070470) SPARC- | gi\|5305327\|gb\|AAD4 | 63% | 560 | 952 |
| | | | | related protein [Mus | 1590.1\|AF070470_1 | 53% | 173 | 418 |
| | | | | musculus] | | 53% | 941 | 1204 |
| | | | | | | 52% | 29 | 178 |
| | | | | | | 48% | 203 | 313 |
| | | | | | | 46% | 620 | 736 |
| | | | | | | 23% | 362 | 604 |
| | | | | | | 34% | 323 | 391 |
| | | | | | | 50% | 584 | 637 |
| | | | | | | 33% | 740 | 811 |
| | | | | | | 28% | 1005 | 1100 |
| | | | | | | 38% | 2218 | 2280 |
| HLDQK77 | 973464 | 378 | HMMER | PFAM: Thyroglobulin | PF00086 | 124.8 | 537 | 734 |
| | | | 2.1.1 | type-1 repeat | | | | |
| | | | blastx.2 | (AF070470) SPARC- | gb\|AAD41590.1\|AF0 | 59% | 9 | 1151 |
| | | | | related protein [Mus | 70470_1 | | | |
| | | | | musculus] | | | | |
| HSCKD11 | 973894 | 191 | HMMER | PFAM: Neurotransmitter- | PF00065 | 31.56 | 147 | 257 |
| | | | 1.8 | gated ion-channel | | | | |
| | | | blastx.2 | (AJ243342) nicotinic | emb\|CAB65091.1\| | 90% | 120 | 296 |
| | | | | acetylcholine receptor | | | | |
| | | | | alpha 9 subunit [Homo | | | | |
| | | | | sapiens] | | | | |
| HDPLT62 | 973945 | 192 | HMMER | PFAM: Neurotransmitter- | PF00065 | 102.12 | 417 | 746 |
| | | | 1.8 | gated ion-channel | | | | |
| | | | blastx | GABA receptor rho-3 | dbj\|BAA09322.1\| | 78% | 414 | 797 |
| | | | | subunit precursor [Rattus | | 92% | 262 | 411 |
| | | | | norvegicus] | | | | |
| HNTCU89 | 1137760 | 193 | blastx.14 | predicted protein contains | gi\|3875955\|emb\|CAA | 30% | 135 | 389 |
| | | | | a large number of Ig 1 1 | 87335.1\| | 44% | 135 | 308 |
| | | | | comes from this gene; | | 41% | 135 | 287 |
| | | | | cDNA EST yk248d7.3 | | 36% | 114 | 293 |
| | | | | comes from this gene; c | | 36% | 90 | 278 |
| | | | | | | 38% | 132 | 311 |
| | | | | | | 34% | 99 | 290 |
| | | | | | | 38% | 291 | 392 |
| | | | | | | 44% | 162 | 275 |
| | | | | | | 32% | 123 | 278 |
| | | | | | | 32% | 135 | 311 |
| | | | | | | 36% | 297 | 410 |
| | | | | | | 36% | 153 | 290 |
| | | | | | | 37% | 135 | 278 |
| | | | | | | 27% | 135 | 275 |
| | | | | | | 54% | 321 | 392 |
| | | | | | | 48% | 306 | 392 |
| | | | | | | 36% | 162 | 311 |
| | | | | | | 53% | 303 | 392 |
| | | | | | | 48% | 312 | 392 |
| | | | | | | 34% | 159 | 287 |
| | | | | | | 46% | 159 | 287 |
| | | | | | | 36% | 132 | 287 |
| | | | | | | 35% | 132 | 311 |
| | | | | | | 26% | 264 | 398 |
| | | | | | | 40% | 297 | 392 |
| | | | | | | 35% | 156 | 266 |
| | | | | | | 40% | 192 | 302 |
| | | | | | | 44% | 312 | 392 |
| | | | | | | 50% | 324 | 395 |
| | | | | | | 50% | 24 | 113 |
| | | | | | | 32% | 15 | 116 |
| | | | | | | 40% | 33 | 158 |
| | | | | | | 41% | 162 | 278 |
| | | | | | | 35% | 297 | 398 |
| | | | | | | 35% | 15 | 125 |
| | | | | | | 38% | 15 | 131 |
| | | | | | | 28% | 132 | 302 |
| | | | | | | 40% | 327 | 392 |
| | | | | | | 34% | 132 | 278 |
| | | | | | | 39% | 21 | 104 |
| | | | | | | 40% | 312 | 392 |
| | | | | | | 39% | 24 | 122 |
| | | | | | | 41% | 162 | 278 |
| | | | | | | 38% | 162 | 287 |
| | | | | | | 45% | 327 | 392 |
| | | | | | | 30% | 3 | 128 |
| | | | | | | 40% | 324 | 389 |
| | | | | | | 35% | 291 | 392 |
| | | | | | | 44% | 27 | 113 |
| | | | | | | 30% | 153 | 281 |
| | | | | | | 32% | 117 | 272 |
| | | | | | | 37% | 198 | 293 |
| | | | | | | 28% | 135 | 272 |
| | | | | | | 57% | 330 | 392 |
| | | | | | | 43% | 24 | 113 |
| | | | | | | 54% | 321 | 386 |
| | | | | | | 22% | 18 | 137 |
| | | | | | | 26% | 27 | 182 |
| | | | | | | 29% | 141 | 272 |
| | | | | | | 34% | 42 | 164 |
| | | | | | | 41% | 321 | 392 |
| | | | | | | 35% | 30 | 113 |
| | | | | | | 32% | 186 | 278 |
| | | | | | | 40% | 42 | 122 |
| | | | | | | 36% | 24 | 113 |
| | | | | | | 31% | 177 | 281 |
| | | | | | | 28% | 297 | 392 |
| | | | | | | 27% | 126 | 278 |
| | | | | | | 41% | 321 | 392 |
| | | | | | | 35% | 15 | 125 |
| | | | | | | 28% | 9 | 122 |
| | | | | | | 33% | 324 | 413 |
| | | | | | | 23% | 264 | 392 |
| | | | | | | 39% | 30 | 113 |
| | | | | | | 36% | 183 | 272 |
| | | | | | | 30% | 162 | 278 |
| | | | | | | 38% | 15 | 92 |
| | | | | | | 27% | 27 | 113 |
| | | | | | | 35% | 54 | 137 |
| | | | | | | 33% | 24 | 113 |
| | | | | | | 28% | 312 | 386 |
| | | | | | | 29% | 42 | 122 |
| | | | | | | 43% | 66 | 113 |
| | | | | | | 32% | 42 | 125 |
| | | | | | | 35% | 480 | 563 |
| | | | | | | 29% | 30 | 122 |
| | | | | | | 39% | 303 | 371 |
| | | | | | | 26% | 42 | 131 |
| | | | | | | 28% | 312 | 386 |
| | | | | | | 46% | 570 | 614 |
| | | | | | | 31% | 300 | 395 |
| | | | | | | 24% | 24 | 110 |
| | | | | | | 72% | 1112 | 1144 |
| | | | | | | 43% | 9 | 56 |
| | | | | | | 58% | 1482 | 1517 |
| | | | | | | 24% | 42 | 152 |
| | | | | | | 35% | 613 | 696 |
| HNTCU89 | 975097 | 379 | HMMER | PFAM: Immunoglobulin | PF00047 | 41.3 | 1710 | 1528 |
| | | | 2.1.1 | domain | | | | |
| | | | blastx | predicted protein contains | emb\|CAA87335.1\| | 30% | 1608 | 1354 |
| | | | | a large number of Ig | | 44% | 1608 | 1435 |
| | | | | superfamily 1 1 gene; | | 41% | 1608 | 1456 |
| | | | | cDNA EST yk248d7.3 | | 36% | 1629 | 1450 |
| | | | | comes from this gene; c | | 36% | 1653 | 1465 |
| | | | | | | 38% | 1611 | 1432 |
| | | | | | | 34% | 1644 | 1453 |
| | | | | | | 38% | 1452 | 1351 |
| | | | | | | 44% | 1581 | 1468 |
| | | | | | | 32% | 1620 | 1465 |
| | | | | | | 32% | 1608 | 1432 |
| | | | | | | 36% | 1446 | 1333 |
| | | | | | | 36% | 1590 | 1453 |
| | | | | | | 37% | 1608 | 1465 |
| | | | | | | 27% | 1608 | 1468 |
| | | | | | | 54% | 1422 | 1351 |
| | | | | | | 48% | 1437 | 1351 |
| | | | | | | 36% | 1581 | 1432 |
| | | | | | | 53% | 1440 | 1351 |
| | | | | | | 48% | 1431 | 1351 |
| | | | | | | 34% | 1584 | 1456 |
| | | | | | | 46% | 1584 | 1456 |
| | | | | | | 36% | 1611 | 1456 |
| | | | | | | 35% | 1611 | 1432 |
| | | | | | | 26% | 1479 | 1345 |
| | | | | | | 40% | 1446 | 1351 |
| | | | | | | 35% | 1587 | 1477 |
| | | | | | | 40% | 1551 | 1441 |
| | | | | | | 50% | 1419 | 1348 |
| | | | | | | 50% | 1719 | 1630 |
| | | | | | | 32% | 1728 | 1627 |
| | | | | | | 40% | 1710 | 1585 |
| | | | | | | 41% | 1581 | 1465 |
| | | | | | | 35% | 1728 | 1618 |
| | | | | | | 38% | 1728 | 1612 |
| | | | | | | 28% | 1611 | 1441 |
| | | | | | | 40% | 1416 | 1351 |
| | | | | | | 34% | 1611 | 1465 |
| | | | | | | 39% | 1722 | 1639 |
| | | | | | | 40% | 1431 | 1351 |
| | | | | | | 39% | 1719 | 1621 |
| | | | | | | 41% | 1581 | 1465 |
| | | | | | | 38% | 1581 | 1456 |
| | | | | | | 45% | 1416 | 1351 |
| | | | | | | 40% | 1419 | 1354 |
| | | | | | | 35% | 1452 | 1351 |
| | | | | | | 44% | 1716 | 1630 |
| | | | | | | 30% | 1590 | 1462 |
| | | | | | | 32% | 1626 | 1471 |
| | | | | | | 37% | 1545 | 1450 |
| | | | | | | 28% | 1608 | 1471 |
| | | | | | | 31% | 1719 | 1615 |
| | | | | | | 43% | 1719 | 1630 |
| | | | | | | 54% | 1422 | 1357 |
| | | | | | | 22% | 1725 | 1606 |
| | | | | | | 26% | 1716 | 1561 |
| | | | | | | 29% | 1602 | 1471 |
| | | | | | | 34% | 1701 | 1579 |
| | | | | | | 41% | 1422 | 1351 |
| | | | | | | 35% | 1713 | 1630 |
| | | | | | | 32% | 1557 | 1465 |
| | | | | | | 35% | 1131 | 1048 |
| HELDY60 | 975104 | 380 | HMMER | PFAM: Thrombospondin | PF00090 | 169.6 | 286 | 438 |
| | | | 2.1.1 | type 1 domain | | | | |
| | | | blastx.14 | putative [Bos taurus] | gi\|508428\|gb\|AAA74 | 47% | 2017 | 2250 |
| | | | | | 122.1\| | 43% | 2041 | 2247 |
| | | | | | | 52% | 2032 | 2208 |
| | | | | | | 42% | 1948 | 2157 |
| | | | | | | 40% | 1432 | 1629 |
| | | | | | | 52% | 1513 | 1650 |
| | | | | | | 37% | 2032 | 2268 |
| | | | | | | 37% | 2041 | 2280 |
| | | | | | | 40% | 2032 | 2238 |
| | | | | | | 53% | 1984 | 2100 |
| | | | | | | 37% | 2041 | 2250 |
| | | | | | | 42% | 2041 | 2208 |
| | | | | | | 37% | 1528 | 1695 |
| | | | | | | 41% | 2041 | 2205 |
| | | | | | | 40% | 1783 | 1938 |
| | | | | | | 45% | 1525 | 1650 |
| | | | | | | 52% | 1597 | 1710 |
| | | | | | | 41% | 1984 | 2136 |
| | | | | | | 43% | 1525 | 1662 |
| | | | | | | 36% | 2032 | 2238 |
| | | | | | | 46% | 1537 | 1659 |
| | | | | | | 40% | 1705 | 1839 |
| | | | | | | 54% | 2032 | 2130 |
| | | | | | | 42% | 1705 | 1845 |
| | | | | | | 42% | 1984 | 2103 |
| | | | | | | 38% | 1450 | 1635 |
| | | | | | | 50% | 2113 | 2238 |
| | | | | | | 34% | 1489 | 1662 |
| | | | | | | 33% | 2041 | 2262 |
| | | | | | | 42% | 1534 | 1659 |
| | | | | | | 38% | 1537 | 1662 |
| | | | | | | 42% | 1537 | 1662 |
| | | | | | | 42% | 1537 | 1662 |
| | | | | | | 48% | 1537 | 1629 |
| | | | | | | 36% | 1783 | 1965 |
| | | | | | | 46% | 2038 | 2160 |
| | | | | | | 39% | 1537 | 1635 |
| | | | | | | 43% | 1780 | 1890 |
| | | | | | | 51% | 1792 | 1878 |
| | | | | | | 32% | 1495 | 1662 |
| | | | | | | 32% | 1537 | 1665 |
| | | | | | | 42% | 2041 | 2154 |
| | | | | | | 41% | 1783 | 1890 |
| | | | | | | 48% | 1537 | 1629 |
| | | | | | | 30% | 1666 | 1845 |
| | | | | | | 36% | 2041 | 2172 |
| | | | | | | 42% | 1495 | 1620 |
| | | | | | | 57% | 2164 | 2247 |
| | | | | | | 39% | 1537 | 1659 |
| | | | | | | 43% | 2041 | 2163 |
| | | | | | | 42% | 1744 | 1842 |
| | | | | | | 45% | 2032 | 2124 |
| | | | | | | 41% | 1537 | 1629 |
| | | | | | | 39% | 2041 | 2154 |
| | | | | | | 42% | 2041 | 2154 |
| | | | | | | 41% | 1534 | 1620 |
| | | | | | | 42% | 2032 | 2145 |
| | | | | | | 38% | 1696 | 1827 |
| | | | | | | 36% | 2041 | 2154 |
| | | | | | | 38% | 1537 | 1662 |
| | | | | | | 51% | 2023 | 2109 |
| | | | | | | 44% | 2041 | 2154 |
| | | | | | | 39% | 1537 | 1650 |
| | | | | | | 29% | 1450 | 1611 |
| | | | | | | 37% | 1534 | 1629 |
| | | | | | | 38% | 1588 | 1695 |
| | | | | | | 28% | 1663 | 1839 |
| | | | | | | 39% | 2041 | 2154 |
| | | | | | | 35% | 1537 | 1653 |
| | | | | | | 41% | 1537 | 1638 |
| | | | | | | 43% | 1843 | 1938 |
| | | | | | | 44% | 2161 | 2247 |
| | | | | | | 41% | 1537 | 1629 |
| | | | | | | 46% | 2161 | 2250 |
| | | | | | | 39% | 1537 | 1620 |
| | | | | | | 63% | 2041 | 2097 |
| | | | | | | 48% | 1537 | 1617 |
| | | | | | | 57% | 2164 | 2226 |
| | | | | | | 70% | 2041 | 2100 |
| | | | | | | 37% | 1414 | 1533 |
| | | | | | | 39% | 2041 | 2139 |
| | | | | | | 57% | 1783 | 1839 |
| | | | | | | 28% | 1534 | 1680 |
| | | | | | | 27% | 1450 | 1593 |
| | | | | | | 48% | 2164 | 2238 |
| | | | | | | 34% | 2011 | 2157 |
| | | | | | | 58% | 1426 | 1497 |
| | | | | | | 50% | 1705 | 1782 |
| | | | | | | 39% | 2032 | 2145 |
| | | | | | | 52% | 2164 | 2238 |
| | | | | | | 34% | 2041 | 2172 |
| | | | | | | 46% | 2161 | 2238 |
| | | | | | | 48% | 1858 | 1938 |
| | | | | | | 43% | 1849 | 1938 |
| | | | | | | 50% | 2161 | 2238 |
| | | | | | | 40% | 2161 | 2250 |
| | | | | | | 48% | 2164 | 2250 |
| | | | | | | 42% | 1705 | 1782 |
| | | | | | | 44% | 1858 | 1938 |
| | | | | | | 42% | 2161 | 2238 |
| | | | | | | 42% | 2032 | 2130 |
| | | | | | | 39% | 2164 | 2247 |
| | | | | | | 52% | 1783 | 1845 |
| | | | | | | 45% | 1780 | 1845 |
| | | | | | | 42% | 2161 | 2238 |
| | | | | | | 43% | 1849 | 1938 |
| | | | | | | 40% | 1780 | 1875 |
| | | | | | | 40% | 2161 | 2250 |
| | | | | | | 42% | 1765 | 1848 |
| | | | | | | 50% | 2032 | 2121 |
| | | | | | | 42% | 1705 | 1782 |
| | | | | | | 52% | 1792 | 1842 |
| | | | | | | 61% | 1792 | 1845 |
| | | | | | | 54% | 2161 | 2226 |
| | | | | | | 41% | 1432 | 1518 |
| | | | | | | 45% | 1774 | 1839 |
| | | | | | | 41% | 2161 | 2232 |
| | | | | | | 52% | 1789 | 1845 |
| | | | | | | 41% | 1426 | 1512 |
| | | | | | | 40% | 1657 | 1737 |
| | | | | | | 55% | 1792 | 1845 |
| | | | | | | 41% | 1855 | 1941 |
| | | | | | | 47% | 2152 | 2208 |
| | | | | | | 47% | 1702 | 1764 |
| | | | | | | 52% | 1789 | 1845 |
| | | | | | | 33% | 1783 | 1863 |
| | | | | | | 50% | 1702 | 1773 |
| | | | | | | 55% | 1705 | 1764 |
| | | | | | | 50% | 2491 | 2544 |
| | | | | | | 37% | 1702 | 1782 |
| | | | | | | 46% | 1852 | 1941 |
| | | | | | | 44% | 1648 | 1728 |
| | | | | | | 57% | 1447 | 1509 |
| | | | | | | 50% | 1597 | 1662 |
| | | | | | | 62% | 2161 | 2208 |
| | | | | | | 33% | 2161 | 2250 |
| | | | | | | 42% | 1525 | 1587 |
| | | | | | | 40% | 1447 | 1527 |
| | | | | | | 58% | 2494 | 2544 |
| | | | | | | 44% | 2014 | 2088 |
| | | | | | | 50% | 1450 | 1509 |
| | | | | | | 42% | 1450 | 1527 |
| | | | | | | 52% | 1792 | 1842 |
| | | | | | | 58% | 1792 | 1842 |
| | | | | | | 66% | 2509 | 2544 |
| | | | | | | 40% | 2041 | 2121 |
| | | | | | | 34% | 1705 | 1782 |
| | | | | | | 50% | 1705 | 1764 |
| | | | | | | 36% | 1840 | 1938 |
| | | | | | | 35% | 1609 | 1710 |
| | | | | | | 30% | 1849 | 1998 |
| | | | | | | 47% | 1984 | 2040 |
| | | | | | | 39% | 1705 | 1788 |
| | | | | | | 55% | 1792 | 1845 |
| | | | | | | 52% | 1537 | 1587 |
| | | | | | | 43% | 1705 | 1773 |
| | | | | | | 56% | 1792 | 1839 |
| | | | | | | 40% | 1534 | 1599 |
| | | | | | | 45% | 1705 | 1764 |
| | | | | | | 53% | 2164 | 2208 |
| | | | | | | 50% | 2041 | 2094 |
| | | | | | | 37% | 1537 | 1617 |
| | | | | | | 47% | 1792 | 1842 |
| | | | | | | 56% | 2161 | 2208 |
| | | | | | | 75% | 2509 | 2544 |
| | | | | | | 36% | 1447 | 1536 |
| | | | | | | 44% | 1789 | 1842 |
| | | | | | | 42% | 2161 | 2238 |
| | | | | | | 35% | 1849 | 1941 |
| | | | | | | 50% | 2032 | 2091 |
| | | | | | | 40% | 1447 | 1512 |
| | | | | | | 41% | 1702 | 1773 |
| | | | | | | 42% | 1450 | 1527 |
| | | | | | | 43% | 1792 | 1839 |
| | | | | | | 50% | 1792 | 1839 |
| | | | | | | 45% | 1705 | 1764 |
| | | | | | | 33% | 1858 | 1938 |
| | | | | | | 37% | 1447 | 1527 |
| | | | | | | 56% | 1789 | 1836 |
| | | | | | | 47% | 2032 | 2088 |
| | | | | | | 47% | 1789 | 1845 |
| | | | | | | 34% | 2494 | 2580 |
| | | | | | | 40% | 1657 | 1731 |
| | | | | | | 47% | 1792 | 1842 |
| | | | | | | 50% | 1705 | 1764 |
| | | | | | | 57% | 1654 | 1710 |
| | | | | | | 60% | 2164 | 2208 |
| | | | | | | 45% | 1450 | 1509 |
| | | | | | | 52% | 2494 | 2544 |
| | | | | | | 34% | 1705 | 1773 |
| | | | | | | 47% | 2494 | 2544 |
| | | | | | | 34% | 1861 | 1938 |
| | | | | | | 44% | 1792 | 1845 |
| | | | | | | 37% | 1702 | 1782 |
| | | | | | | 39% | 1687 | 1770 |
| | | | | | | 50% | 1792 | 1857 |
| | | | | | | 32% | 2494 | 2586 |
| | | | | | | 42% | 1420 | 1497 |
| | | | | | | 43% | 1792 | 1839 |
| | | | | | | 45% | 1948 | 2007 |
| | | | | | | 47% | 1888 | 1938 |
| | | | | | | 66% | 2509 | 2544 |
| | | | | | | 53% | 1981 | 2025 |
| | | | | | | 60% | 1897 | 1941 |
| | | | | | | 50% | 1792 | 1845 |
| | | | | | | 40% | 2494 | 2568 |
| | | | | | | 34% | 1450 | 1527 |
| | | | | | | 47% | 2161 | 2217 |
| | | | | | | 50% | 2503 | 2544 |
| | | | | | | 50% | 1858 | 1893 |
| | | | | | | 41% | 1789 | 1839 |
| | | | | | | 58% | 2509 | 2544 |
| | | | | | | 41% | 1981 | 2031 |
| | | | | | | 44% | 1984 | 2037 |
| | | | | | | 34% | 2494 | 2571 |
| | | | | | | 38% | 1945 | 2007 |
| | | | | | | 42% | 1981 | 2037 |
| | | | | | | 33% | 1447 | 1527 |
| | | | | | | 33% | 1528 | 1617 |
| | | | | | | 61% | 2462 | 2500 |
| | | | | | | 36% | 2032 | 2088 |
| | | | | | | 33% | 1702 | 1773 |
| | | | | | | 31% | 2104 | 2208 |
| | | | | | | 66% | 2164 | 2199 |
| | | | | | | 50% | 1792 | 1845 |
| | | | | | | 47% | 2544 | 2594 |
| | | | | | | 33% | 1696 | 1767 |
| | | | | | | 34% | 1537 | 1605 |
| | | | | | | 25% | 1948 | 2064 |
| | | | | | | 45% | 1600 | 1659 |
| | | | | | | 53% | 2550 | 2594 |
| | | | | | | 42% | 2494 | 2550 |
| | | | | | | 36% | 2494 | 2568 |
| | | | | | | 50% | 2547 | 2594 |
| | | | | | | 53% | 1855 | 1893 |
| | | | | | | 39% | 2509 | 2577 |
| | | | | | | 36% | 2494 | 2568 |
| | | | | | | 44% | 2494 | 2547 |
| | | | | | | 47% | 2494 | 2544 |
| | | | | | | 70% | 1849 | 1878 |
| | | | | | | 33% | 1402 | 1509 |
| | | | | | | 50% | 1792 | 1845 |
| | | | | | | 60% | 2164 | 2208 |
| | | | | | | 34% | 1702 | 1770 |
| | | | | | | 38% | 2494 | 2547 |
| | | | | | | 33% | 1570 | 1659 |
| | | | | | | 40% | 2494 | 2568 |
| | | | | | | 53% | 1537 | 1581 |
| | | | | | | 52% | 2544 | 2594 |
| | | | | | | 53% | 2462 | 2500 |
| | | | | | | 40% | 2509 | 2568 |
| | | | | | | 72% | 1489 | 1521 |
| | | | | | | 43% | 2113 | 2160 |
| | | | | | | 53% | 1849 | 1887 |
| | | | | | | 38% | 2494 | 2547 |
| | | | | | | 44% | 2494 | 2547 |
| | | | | | | 46% | 2032 | 2076 |
| | | | | | | 47% | 2494 | 2544 |
| | | | | | | 42% | 139 | 195 |
| | | | | | | 39% | 1969 | 2037 |
| | | | | | | 45% | 1789 | 1848 |
| | | | | | | 50% | 2161 | 2208 |
| | | | | | | 42% | 1705 | 1767 |
| | | | | | | 32% | 1948 | 2031 |
| | | | | | | 46% | 2550 | 2594 |
| | | | | | | 46% | 1537 | 1581 |
| | | | | | | 42% | 1603 | 1659 |
| | | | | | | 58% | 2465 | 2500 |
| | | | | | | 47% | 2494 | 2544 |
| | | | | | | 40% | 1732 | 1776 |
| | | | | | | 70% | 1666 | 1695 |
| | | | | | | 53% | 1984 | 2028 |
| | | | | | | 50% | 1738 | 1773 |
| | | | | | | 64% | 1966 | 2007 |
| | | | | | | 38% | 1792 | 1845 |
| | | | | | | 53% | 1606 | 1650 |
| | | | | | | 47% | 2544 | 2594 |
| | | | | | | 37% | 1534 | 1581 |
| | | | | | | 38% | 2494 | 2547 |
| | | | | | | 75% | 2462 | 2485 |
| | | | | | | 50% | 2503 | 2544 |
| | | | | | | 54% | 1909 | 1941 |
| | | | | | | 47% | 1705 | 1755 |
| | | | | | | 44% | 1972 | 2025 |
| | | | | | | 54% | 1666 | 1698 |
| | | | | | | 46% | 1963 | 2007 |
| | | | | | | 63% | 1666 | 1698 |
| | | | | | | 69% | 1657 | 1695 |
| | | | | | | 80% | 1666 | 1695 |
| | | | | | | 47% | 2494 | 2544 |
| | | | | | | 53% | 1666 | 1710 |
| | | | | | | 80% | 1666 | 1695 |
| | | | | | | 40% | 1666 | 1710 |
| | | | | | | 37% | 1705 | 1776 |
| | | | | | | 46% | 1840 | 1878 |
| | | | | | | 53% | 1978 | 2016 |
| | | | | | | 53% | 1657 | 1695 |
| | | | | | | 47% | 1609 | 1659 |
| | | | | | | 77% | 2462 | 2488 |
| | | | | | | 43% | 1663 | 1710 |
| | | | | | | 56% | 2547 | 2594 |
| | | | | | | 53% | 1600 | 1638 |
| | | | | | | 70% | 1666 | 1695 |
| | | | | | | 33% | 1702 | 1764 |
| | | | | | | 42% | 1975 | 2031 |
| | | | | | | 45% | 2485 | 2544 |
| | | | | | | 34% | 2485 | 2562 |
| | | | | | | 70% | 1909 | 1938 |
| | | | | | | 70% | 1984 | 2013 |
| | | | | | | 31% | 1984 | 2031 |
| | | | | | | 44% | 2494 | 2547 |
| | | | | | | 30% | 1849 | 1938 |
| | | | | | | 28% | 1489 | 1602 |
| | | | | | | 31% | 1960 | 2025 |
| | | | | | | 50% | 2119 | 2160 |
| | | | | | | 58% | 2509 | 2544 |
| | | | | | | 38% | 1447 | 1509 |
| | | | | | | 46% | 2509 | 2547 |
| | | | | | | 70% | 2462 | 2491 |
| | | | | | | 32% | 1426 | 1509 |
| | | | | | | 53% | 1657 | 1695 |
| | | | | | | 36% | 1537 | 1602 |
| | | | | | | 50% | 1942 | 1983 |
| | | | | | | 38% | 1666 | 1728 |
| | | | | | | 50% | 1852 | 1887 |
| | | | | | | 58% | 1852 | 1887 |
| | | | | | | 41% | 1852 | 1887 |
| | | | | | | 41% | 1858 | 1908 |
| | | | | | | 54% | 1735 | 1767 |
| | | | | | | 38% | 1885 | 1938 |
| | | | | | | 100% | 2462 | 2482 |
| | | | | | | 66% | 2462 | 2488 |
| | | | | | | 70% | 1666 | 1695 |
| | | | | | | 53% | 1666 | 1710 |
| | | | | | | 40% | 1450 | 1509 |
| | | | | | | 50% | 2509 | 2544 |
| | | | | | | 53% | 2462 | 2500 |
| | | | | | | 46% | 2550 | 2594 |
| | | | | | | 77% | 1744 | 1770 |
| | | | | | | 31% | 1954 | 2010 |
| | | | | | | 50% | 1657 | 1698 |
| | | | | | | 30% | 1864 | 1941 |
| | | | | | | 53% | 2462 | 2500 |
| | | | | | | 37% | 1450 | 1521 |
| | | | | | | 60% | 1909 | 1938 |
| | | | | | | 60% | 1909 | 1938 |
| | | | | | | 85% | 1984 | 2004 |
| | | | | | | 60% | 1852 | 1881 |
| | | | | | | 70% | 1666 | 1695 |
| | | | | | | 31% | 1837 | 1893 |
| | | | | | | 63% | 1909 | 1941 |
| | | | | | | 60% | 1909 | 1938 |
| | | | | | | 38% | 1702 | 1755 |
| | | | | | | 75% | 2462 | 2485 |
| | | | | | | 53% | 2462 | 2500 |
| | | | | | | 87% | 2462 | 2485 |
| | | | | | | 75% | 2462 | 2485 |
| | | | | | | 30% | 2494 | 2562 |
| | | | | | | 50% | 2509 | 2544 |
| | | | | | | 60% | 1978 | 2007 |
| | | | | | | 43% | 2547 | 2594 |
| | | | | | | 29% | 2074 | 2154 |
| | | | | | | 54% | 1909 | 1941 |
| | | | | | | 50% | 2509 | 2544 |
| | | | | | | 42% | 1972 | 2013 |
| | | | | | | 60% | 1666 | 1695 |
| | | | | | | 60% | 1909 | 1938 |
| | | | | | | 46% | 2462 | 2500 |
| | | | | | | 71% | 2462 | 2482 |
| | | | | | | 53% | 1849 | 1887 |
| | | | | | | 40% | 310 | 375 |
| | | | | | | 44% | 1939 | 1992 |
| | | | | | | 40% | 1537 | 1581 |
| | | | | | | 63% | 1663 | 1695 |
| | | | | | | 40% | 1666 | 1710 |
| | | | | | | 46% | 1666 | 1710 |
| | | | | | | 32% | 1426 | 1509 |
| | | | | | | 50% | 2547 | 2588 |
| | | | | | | 66% | 1741 | 1767 |
| | | | | | | 58% | 1969 | 2004 |
| | | | | | | 75% | 2462 | 2485 |
| | | | | | | 37% | 2544 | 2591 |
| | | | | | | 43% | 1615 | 1662 |
| | | | | | | 30% | 1705 | 1782 |
| | | | | | | 40% | 2068 | 2112 |
| | | | | | | 40% | 1450 | 1515 |
| | | | | | | 66% | 1744 | 1770 |
| | | | | | | 54% | 1978 | 2010 |
| | | | | | | 46% | 1666 | 1710 |
| | | | | | | 40% | 1666 | 1710 |
| | | | | | | 33% | 1666 | 1737 |
| | | | | | | 53% | 1615 | 1659 |
| | | | | | | 50% | 1909 | 1938 |
| | | | | | | 71% | 1858 | 1878 |
| | | | | | | 35% | 1789 | 1839 |
| | | | | | | 38% | 1819 | 1881 |
| | | | | | | 50% | 2113 | 2154 |
| | | | | | | 62% | 2462 | 2485 |
| | | | | | | 75% | 2462 | 2485 |
| | | | | | | 46% | 2550 | 2594 |
| | | | | | | 85% | 2462 | 2482 |
| | | | | | | 50% | 2509 | 2544 |
| | | | | | | 47% | 2104 | 2154 |
| | | | | | | 46% | 2462 | 2500 |
| | | | | | | 50% | 1945 | 1992 |
| | | | | | | 50% | 1909 | 1938 |
| | | | | | | 29% | 1426 | 1518 |
| | | | | | | 38% | 2462 | 2500 |
| | | | | | | 85% | 2462 | 2482 |
| | | | | | | 35% | 2544 | 2594 |
| | | | | | | 42% | 2509 | 2550 |
| | | | | | | 35% | 2494 | 2544 |
| | | | | | | 50% | 1984 | 2025 |
| | | | | | | 85% | 2462 | 2482 |
| | | | | | | 46% | 2550 | 2594 |
| | | | | | | 32% | 294 | 368 |
| | | | | | | 61% | 1990 | 2028 |
| | | | | | | 41% | 1447 | 1497 |
| | | | | | | 50% | 1909 | 1938 |
| | | | | | | 60% | 1489 | 1518 |
| | | | | | | 46% | 2113 | 2157 |
| | | | | | | 41% | 1909 | 1959 |
| | | | | | | 85% | 2462 | 2482 |
| | | | | | | 55% | 1981 | 2007 |
| | | | | | | 71% | 1984 | 2004 |
| | | | | | | 33% | 1609 | 1689 |
| | | | | | | 70% | 1666 | 1695 |
| | | | | | | 71% | 2462 | 2482 |
| | | | | | | 37% | 2182 | 2229 |
| | | | | | | 40% | 1666 | 1710 |
| | | | | | | 29% | 1426 | 1506 |
| | | | | | | 55% | 1852 | 1878 |
| | | | | | | 46% | 2462 | 2500 |
| | | | | | | 42% | 1939 | 1995 |
| | | | | | | 42% | 1741 | 1782 |
| | | | | | | 71% | 2462 | 2482 |
| | | | | | | 50% | 1909 | 1938 |
| | | | | | | 46% | 1444 | 1488 |
| | | | | | | 25% | 139 | 258 |
| | | | | | | 46% | 1495 | 1533 |
| | | | | | | 35% | 2494 | 2544 |
| | | | | | | 36% | 1693 | 1749 |
| | | | | | | 62% | 1816 | 1839 |
| | | | | | | 85% | 1984 | 2004 |
| | | | | | | 85% | 2462 | 2482 |
| | | | | | | 50% | 2547 | 2594 |
| HGBGO22 | 558830 | 381 | HMMER | PFAM: Annexins | PF00191 | 35.5 | 114 | 272 |
| | | | 1.8 | | | | | |
| | | | blastx.2 | intestine-specific annexin | emb\|CAA77578.1\| | 51% | 25 | 291 |
| | | | | [Homo sapiens] | | 40% | 84 | 356 |
| | | | | | | 48% | 143 | 352 |
| HFXDP53 | 578868 | 196 | HMMER | PFAM: CUB domain | PF00431 | 11.77 | 21 | 77 |
| | | | 1.8 | | | | | |
| HMTAV95 | 614936 | 197 | HMMER | PFAM: Fibronectin type | PF00041 | 11.91 | 6 | 182 |
| | | | 1.8 | III domain | | | | |
| | | | blastx.2 | CG4668 PROTEIN. | sp\|Q9VJJ8\|Q9VJJ8 | 37% | 6 | 281 |
| | | | | | | 28% | 320 | 361 |
| HDPGS68 | 752975 | 382 | HMMER | PFAM: Zinc-binding | PF00099 | 6.96 | 208 | 246 |
| | | | 1.8 | metalloprotease domain | | | | |
| | | | blastx.2 | ORF2-LIKE PROTEIN | sp\|O00549\|O00549 | 37% | 370 | 2 |
| | | | | (FRAGMENT). | | | | |
| HCGME42 | 768283 | 383 | HMMER | PFAM: IG | PF00047 | 11.7 | 132 | 383 |
| | | | 1.8 | (immunoglobulin) | | | | |
| | | | | superfamily | | | | |
| | | | blastx.2 | (AF181660) | gb\|AAF00621.1\|AF1 | 27% | 54 | 446 |
| | | | | immunoglobulin | 81660_1 | | | |
| | | | | superfamily member | | | | |
| | | | | WM78 1 | | | | |
| HLWAV41 | 1159074 | 200 | blastx.14 | (AF031174) Ig-like | gi\|3766136\|gb\|AAC7 | 91% | 630 | 1112 |
| | | | | membrane protein [Homo | 2013.1\| | 98% | 136 | 576 |
| | | | | sapiens] | | 100% | 36 | 137 |
| | | | | | | 47% | 241 | 447 |
| | | | | | | 42% | 205 | 414 |
| | | | | | | 35% | 256 | 525 |
| | | | | | | 41% | 699 | 899 |
| | | | | | | 30% | 1 | 234 |
| | | | | | | 24% | 151 | 522 |
| | | | | | | 47% | 717 | 875 |
| | | | | | | 31% | 702 | 884 |
| | | | | | | 32% | 142 | 345 |
| | | | | | | 26% | 702 | 857 |
| | | | | | | 37% | 741 | 899 |
| | | | | | | 28% | 151 | 318 |
| | | | | | | 30% | 1 | 117 |
| | | | | | | 100% | 1 | 36 |
| | | | | | | 32% | 94 | 186 |
| | | | | | | 29% | 702 | 803 |
| | | | | | | 30% | 406 | 522 |
| | | | | | | 29% | 217 | 309 |
| | | | | | | 21% | 400 | 522 |
| | | | | | | 35% | 797 | 880 |
| | | | | | | 27% | 37 | 156 |
| | | | | | | 50% | 360 | 401 |
| HLWAV41 | 786224 | 384 | HMMER | PFAM: IG | PF00047 | 12.06 | 250 | 312 |
| | | | 1.8 | (immunoglobulin) | | | | |
| | | | | superfamily | | | | |
| | | | blastx.2 | (AF031174) Ig-like | gb\|AAC72013.1\| | 96% | 136 | 390 |
| | | | | membrane protein [Homo | 37% | 1 | 390 | |
| | | | | sapiens] | | 100% | 36 | 137 |
| | | | | | | 39% | 139 | 390 |
| | | | | | | 26% | 37 | 399 |
| | | | | | | 30% | 1 | 117 |
| | | | | | | 100% | 1 | 36 |
| | | | | | | 25% | 227 | 406 |
| HLDBL95 | 811269 | 385 | HMMER | PFAM: IG | PF00047 | 3.27 | 352 | 420 |
| | | | 1.8 | (immunoglobulin) | | | | |
| | | | | superfamily | | | | |
| | | | blastx.2 | (AF134918) semaphorin | gb\|AAD30541.1\|AF1 | 78% | 205 | 444 |
| | | | | subclass 4 member G | 34918_1 | 70% | 2 | 211 |
| | | | | [Mus musculus] | | 50% | 228 | 269 |
| HHFGP83 | 828162 | 202 | HMMER | PFAM: Fibronectin type | PF00041 | 34.53 | 68 | 271 |
| | | | 1.8 | III domain | | | | |
| | | | blastx.2 | CDO protein - human | pir\|T03097\|T03097 | 68% | 68 | 265 |
| | | | | | | 55% | 258 | 317 |
| HEGAR66 | 1199137 | 203 | blastx.14 | CDO protein - human | pir\|T03097\|T03097 | 55% | 1 | 369 |
| | | | | | | 38% | 425 | 532 |
| | | | | | | 53% | 482 | 526 |
| | | | | | | 33% | 446 | 526 |
| HEGAR66 | 844291 | 386 | HMMER | PFAM: IG | PF00047 | 12.68 | 163 | 342 |
| | | | 1.8 | (immunoglobulin) | | | | |
| | | | | superfamily | | | | |
| | | | blastx | (AF004841) CDO [Homo | gb\|AAC34901.1\| | 52% | 1 | 408 |
| | | | | sapiens] | | 38% | 425 | 532 |
| | | | | | | 53% | 482 | 526 |
| | | | | | | 33% | 446 | 526 |
| HAPPY24 | 844293 | 387 | HMMER | PFAM: IG | PF00047 | 3.16 | 17 | 181 |
| | | | 1.8 | (immunoglobulin) | | | | |
| | | | | superfamily | | | | |
| | | | blastx.2 | (AJ130710) QA79 | emb\|CAB51126.1\| | 92% | 2 | 268 |
| | | | | membrane protein, allelic | | 100% | 237 | 365 |
| | | | | variant airm-1b [Homo | | 44% | 370 | 525 |
| | | | | sapiens] | | 68% | 461 | 523 |
| | | | | | | 36% | 443 | 517 |
| HE9TK49 | 856343 | 205 | HMMER | PFAM: Ion transport | PF00520 | 77.02 | 11 | 256 |
| | | | 1.8 | proteins | | | | |
| | | | blastx.2 | (AB012043) NBR13 | dbj\|BAA36409.1\| | 95% | 2 | 256 |
| | | | | [Homo sapiens] | | 50% | 256 | 327 |
| | | | | | | 37% | 259 | 282 |
| HORBO54 | 870674 | 206 | HMMER | PFAM: Zinc-binding | PF00099 | 5.64 | 277 | 300 |
| | | | 1.8 | metalloprotease domain | | | | |
| HFKFL92 | 880139 | 388 | HMMER | PFAM: BolA-like protein | PF01722 | 42.2 | 230 | 382 |
| | | | 2.11 | | | | | |
| HETLT82 | 883273 | 208 | HMMER | PFAM: IG | PF00047 | 30.56 | 319 | 519 |
| | | | 1.8 | (immunoglobulin) | | | | |
| | | | | superfamily | | | | |
| | | | blastx | (AK000358) unnamed | dbj\|BAA91108.1\| | 73% | 469 | 513 |
| | | | | protein product [Homo | | 40% | 298 | 402 |
| | | | | sapiens] | | 84% | 547 | 585 |
| | | | | | | 43% | 600 | 647 |
| HWAEU35 | 1199854 | 209 | blastx.14 | CMRF-35 antigen- | pir\|I37243\|I37243 | 55% | 18 | 173 |
| | | | | human | | 59% | 180 | 290 |
| | | | | | | 39% | 411 | 533 |
| | | | | | | 38% | 357 | 410 |
| | | | | | | 42% | 327 | 383 |
| HWAEU35 | 887166 | 389 | HMMER | PFAM: Immunoglobulin | PF00047 | 23.2 | 40 | 273 |
| | | | 2.1.1 | domain | | | | |
| | | | blastx | CMRF-35 antigen [Homo | emb\|CAA46948.1\| | 55% | 7 | 162 |
| | | | | sapiens] | | 59% | 169 | 279 |
| | | | | | | 60% | 400 | 474 |
| | | | | | | 38% | 346 | 399 |
| | | | | | | 42% | 316 | 372 |
| HMWDB84 | 1002167 | 210 | blastx.14 | CD80-like protein | gi\|2462297\|emb\|CAA | 62% | 577 | 687 |
| | | | | precursor [Gallus gallus] | 70058.1\| | 29% | 292 | 537 |
| | | | | | | 22% | 706 | 972 |
| | | | | | | 63% | 256 | 288 |
| HMWDB84 | 899872 | 390 | HMMER | PFAM: Immunoglobulin | PF00047 | 26.9 | 217 | 474 |
| | | | 2.1.1 | domain | | | | |
| | | | blastx | (AF199028) B7-like | gb\|AAF34739.1\|AF1 | 99% | 130 | 1026 |
| | | | | protein [Homo sapiens] | 99028_1 | | | |
| HMWDB84 | 944569 | 391 | blastx.2 | (AF199028) B7-like | gb\|AAF34739.1\|AF1 | 90% | 19 | 183 |
| | | | | protein [Homo sapiens] | 99028_1 | | | |
| HMWDB84 | 944570 | 392 | HMMER | PFAM: Immunoglobulin | PF00047 | 26.9 | 216 | 473 |
| | | | 2.1.1 | domain | | | | |
| | | | blastx.2 | (AF199028) B7-like | gb\|AAF34739.1\|AF1 | 99% | 129 | 1025 |
| | | | | protein [Homo sapiens] | 99028_1 | | | |
| HMSNC17 | 1137873 | 211 | blastx.14 | (AF030455) epithelial V- | gi\|3169830\|gb\|AAC3 | 40% | 4 | 285 |
| | | | | like antigen precursor | 9762.1\| | | | |
| | | | | [Homo sapiens] | | | | |
| HMSNC17 | 903712 | 393 | HMMER | PFAM: IG | PF00047 | 4.46 | 280 | 339 |
| | | | 1.8 | (immunoglobulin) | | | | |
| | | | | superfamily | | | | |
| | | | blastx | unnamed protein product | emb\|CAB42187.1\| | 85% | 12 | 134 |
| | | | | [unidentified] | | 33% | 535 | 588 |
| HPWAY10 | 908549 | 394 | HMMER | PFAM: KRAB box | PF01352 | 156.3 | 206 | 394 |
| | | | 2.1.1 | | | | | |
| | | | blastx.14 | zinc finger protein 30 | gi\|456269\|emb\|CAA8 | 70% | 152 | 325 |
| | | | | [Mus musculus | 2913.1\| | 67% | 326 | 454 |
| | | | | domesticus] | | | | |
| HOHCE52 | 1135291 | 213 | blastx.14 | (AF060865) zinc finger | gi\|3818515\|gb\|AAC7 | 57% | 314 | 3 |
| | | | | protein ZNF210 [Homo | 0007.1\| | 58% | 317 | 3 |
| | | | | sapiens] | | 57% | 302 | 3 |
| | | | | | | 56% | 314 | 3 |
| | | | | | | 52% | 317 | 3 |
| | | | | | | 56% | 317 | 57 |
| | | | | | | 51% | 233 | 3 |
| | | | | | | 46% | 656 | 528 |
| | | | | | | 39% | 722 | 654 |
| | | | | | | 47% | 417 | 367 |
| HOHCE52 | 909141 | 395 | HMMER | PFAM: Zinc finger, C2H2 | PF00096 | 99.1 | 252 | 320 |
| | | | 2.1.1 | type | | | | |
| | | | blastx.2 | ZINC FINGER PROTEIN | sp\|Q9UL59\|Z214_H | 68% | 66 | 377 |
| | | | | 214 (BWSCR2 | UMAN | 63% | 66 | 377 |
| | | | | ASSOCIATED ZINC- | | 63% | 66 | 377 |
| | | | | FINGER 1 | | 63% | 66 | 377 |
| | | | | | | 60% | 66 | 377 |
| | | | | | | 58% | 66 | 377 |
| | | | | | | 54% | 66 | 377 |
| | | | | | | 50% | 63 | 377 |
| | | | | | | 58% | 66 | 314 |
| | | | | | | 43% | 111 | 377 |
| | | | | | | 40% | 90 | 377 |
| | | | | | | 51% | 66 | 230 |
| HLHCR16 | 910123 | 214 | HMMER | PFAM: Sushi domain | PF00084 | 744.9 | 197 | 358 |
| | | | 2.1.1 | (SCR repeat) | | | | |
| | | | blastx.2 | complement receptor 1 - | pir\|I36936\|I36936 | 29% | 710 | 1600 |
| | | | | chimpanzee (fragment) | | 30% | 1166 | 1921 |
| | | | | | | 31% | 818 | 1636 |
| | | | | | | 30% | 1958 | 2764 |
| | | | | | | 28% | 710 | 1513 |
| | | | | | | 29% | 1163 | 1921 |
| | | | | | | 29% | 1757 | 2632 |
| | | | | | | 28% | 1766 | 2632 |
| | | | | | | 31% | 911 | 1636 |
| | | | | | | 26% | 1970 | 3031 |
| | | | | | | 27% | 1754 | 2605 |
| | | | | | | 28% | 1166 | 1921 |
| | | | | | | 30% | 2378 | 3031 |
| | | | | | | 36% | 20 | 562 |
| | | | | | | 29% | 1244 | 1921 |
| | | | | | | 26% | 2210 | 3163 |
| | | | | | | 26% | 2210 | 3163 |
| | | | | | | 32% | 11 | 571 |
| | | | | | | 32% | 11 | 571 |
| | | | | | | 32% | 710 | 1204 |
| | | | | | | 32% | 11 | 562 |
| | | | | | | 32% | 710 | 1204 |
| | | | | | | 30% | 23 | 595 |
| | | | | | | 30% | 992 | 1630 |
| | | | | | | 32% | 710 | 1204 |
| | | | | | | 29% | 23 | 595 |
| | | | | | | 36% | 23 | 460 |
| | | | | | | 33% | 20 | 460 |
| | | | | | | 27% | 32 | 844 |
| | | | | | | 29% | 728 | 1387 |
| | | | | | | 30% | 983 | 1549 |
| | | | | | | 28% | 728 | 1387 |
| | | | | | | 31% | 713 | 1246 |
| | | | | | | 32% | 2657 | 3124 |
| | | | | | | 31% | 860 | 1387 |
| | | | | | | 30% | 518 | 1228 |
| | | | | | | 31% | 713 | 1246 |
| | | | | | | 33% | 713 | 1117 |
| | | | | | | 32% | 701 | 1114 |
| | | | | | | 32% | 113 | 574 |
| | | | | | | 32% | 113 | 574 |
| | | | | | | 31% | 2417 | 2983 |
| | | | | | | 30% | 1811 | 2242 |
| | | | | | | 32% | 2642 | 3109 |
| | | | | | | 34% | 80 | 460 |
| | | | | | | 32% | 1244 | 1639 |
| | | | | | | 33% | 701 | 1111 |
| | | | | | | 31% | 95 | 547 |
| | | | | | | 29% | 2219 | 2983 |
| | | | | | | 31% | 2681 | 3130 |
| | | | | | | 29% | 2618 | 3109 |
| | | | | | | 30% | 734 | 1171 |
| | | | | | | 31% | 1109 | 1537 |
| | | | | | | 32% | 80 | 451 |
| | | | | | | 31% | 2219 | 2761 |
| | | | | | | 32% | 725 | 1114 |
| | | | | | | 25% | 1721 | 2452 |
| | | | | | | 29% | 113 | 574 |
| | | | | | | 31% | 725 | 1114 |
| | | | | | | 28% | 1550 | 2113 |
| | | | | | | 26% | 2474 | 3319 |
| | | | | | | 30% | 1472 | 2026 |
| | | | | | | 27% | 1424 | 2113 |
| | | | | | | 25% | 2474 | 3100 |
| | | | | | | 25% | 1721 | 2452 |
| | | | | | | 27% | 1100 | 1639 |
| | | | | | | 29% | 893 | 1363 |
| | | | | | | 35% | 11 | 364 |
| | | | | | | 26% | 1721 | 2326 |
| | | | | | | 27% | 2555 | 3322 |
| | | | | | | 26% | 1721 | 2449 |
| | | | | | | 33% | 182 | 574 |
| | | | | | | 26% | 1100 | 1630 |
| | | | | | | 29% | 2549 | 2938 |
| | | | | | | 30% | 1997 | 2401 |
| | | | | | | 30% | 38 | 424 |
| | | | | | | 32% | 1241 | 1657 |
| | | | | | | 30% | 626 | 1015 |
| | | | | | | 30% | 734 | 1090 |
| | | | | | | 25% | 1250 | 1852 |
| | | | | | | 24% | 1250 | 1852 |
| | | | | | | 30% | 38 | 370 |
| | | | | | | 31% | 95 | 382 |
| | | | | | | 31% | 95 | 382 |
| | | | | | | 31% | 734 | 1090 |
| | | | | | | 26% | 1769 | 2464 |
| | | | | | | 31% | 725 | 1015 |
| | | | | | | 31% | 725 | 1015 |
| | | | | | | 29% | 1799 | 2056 |
| | | | | | | 25% | 1472 | 1882 |
| | | | | | | 30% | 593 | 847 |
| | | | | | | 22% | 371 | 598 |
| HLHCR16 | 965511 | 396 | HMMER | PFAM: Sushi domain | PF00084 | 357.8 | 197 | 358 |
| | | | 2.1.1 | (SCR repeat) | | | | |
| | | | blastx.2 | furrowed [Drosophila | gb\|AAB36703.1\| | 31% | 638 | 1480 |
| | | | | melanogaster] | | 28% | 254 | 1228 |
| | | | | | | 34% | 737 | 1387 |
| | | | | | | 28% | 254 | 1120 |
| | | | | | | 35% | 89 | 604 |
| | | | | | | 32% | 908 | 1468 |
| | | | | | | 34% | 692 | 1189 |
| | | | | | | 30% | 740 | 1270 |
| | | | | | | 30% | 419 | 1018 |
| | | | | | | 32% | 11 | 529 |
| | | | | | | 27% | 17 | 916 |
| | | | | | | 27% | 17 | 553 |
| | | | | | | 34% | 1100 | 1480 |
| | | | | | | 28% | 11 | 445 |
| | | | | | | 30% | 977 | 1480 |
| | | | | | | 37% | 365 | 571 |
| | | | | | | 29% | 1220 | 1489 |
| HFKJO15 | 910828 | 215 | HMMER | PFAM: Laminin EGF-like | PF00053 | 20.47 | 18 | 191 |
| | | | 1.8 | (Domains III and V) | | | | |
| | | | blastx.14 | acetyl LDL receptor | gi\|2723469\|dbj\|BAA2 | 51% | 12 | 539 |
| | | | | [Homo sapiens] | 4070.1\| | 46% | 69 | 191 |
| | | | | | | 38% | 12 | 152 |
| | | | | | | 41% | 78 | 200 |
| | | | | | | 41% | 99 | 191 |
| | | | | | | 36% | 417 | 539 |
| | | | | | | 48% | 465 | 539 |
| | | | | | | 38% | 78 | 170 |
| | | | | | | 36% | 63 | 152 |
| | | | | | | 40% | 246 | 326 |
| | | | | | | 35% | 246 | 329 |
| | | | | | | 37% | 381 | 461 |
| | | | | | | 50% | 12 | 71 |
| | | | | | | 33% | 246 | 335 |
| | | | | | | 33% | 276 | 356 |
| | | | | | | 36% | 474 | 539 |
| | | | | | | 44% | 12 | 65 |
| | | | | | | 29% | 150 | 260 |
| | | | | | | 46% | 381 | 425 |
| | | | | | | 31% | 183 | 287 |
| | | | | | | 40% | 246 | 305 |
| | | | | | | 42% | 378 | 440 |
| | | | | | | 50% | 285 | 326 |
| | | | | | | 45% | 111 | 170 |
| | | | | | | 24% | 285 | 395 |
| | | | | | | 26% | 381 | 470 |
| | | | | | | 40% | 243 | 287 |
| | | | | | | 42% | 420 | 476 |
| | | | | | | 40% | 330 | 374 |
| | | | | | | 50% | 510 | 539 |
| | | | | | | 62% | 3 | 26 |
| | | | | | | 31% | 6 | 71 |
| HEMCL65 | 910900 | 216 | HMMER | PFAM: Fibronectin type | PF00041 | 22.41 | 93 | 278 |
| | | | 1.8 | III domain | | | | |
| | | | blastx.2 | ROUNDABOUT 1. | sp\|Q9Y6N7\|Q9Y6N7 | 41% | 9 | 311 |
| | | | | | | 47% | 311 | 373 |
| HMAMB94 | 910909 | 217 | HMMER | PFAM: Fibronectin type | PF00041 | 73.7 | 234 | 497 |
| | | | 2.1.1 | III domain | | | | |
| | | | blastx.2 | CG4668 PROTEIN. | sp\|Q9VJJ8\|Q9VJJ8 | 36% | 45 | 551 |
| | | | | | | 25% | 3 | 638 |
| | | | | | | 30% | 54 | 557 |
| | | | | | | 29% | 96 | 575 |
| HAHFI44 | 1135975 | 218 | blastx.14 | (AF151909) CGI-151 | gi\|4929771\|gb\|AAD3 | 70% | 16 | 642 |
| | | | | protein [Homo sapiens] | 4146.1\|AF151909_1 | 36% | 343 | 627 |
| | | | | | | 55% | 640 | 726 |
| | | | | | | 30% | 88 | 207 |
| | | | | | | 39% | 511 | 648 |
| | | | | | | 35% | 211 | 327 |
| HAHFI44 | 910942 | 397 | HMMER | PFAM: IG | PF00047 | 27.42 | 379 | 567 |
| | | | 1.8 | (immunoglobulin) | | | | |
| | | | | superfamily | | | | |
| | | | blastx.2 | (AF151909) CGI-151 | gb\|AAD34146.1\|AF1 | 60% | 226 | 702 |
| | | | | protein [Homo sapiens] | 51909_1 | 76% | 9 | 122 |
| | | | | | | 52% | 128 | 286 |
| | | | | | | 36% | 334 | 618 |
| HKMLN95 | 914083 | 219 | HMMER | PFAM: Alcohol/other | PF00106 | 100.69 | 23 | 361 |
| | | | 1.8 | dehydrogenases, short | | | | |
| | | | | chain type | | | | |
| | | | blastx.2 | STEROID | sp\|Q9Y6G8\|Q9Y6G8 | 98% | 20 | 583 |
| | | | | DEHYDROGENASE | | | | |
| | | | | HOMOLOG. | | | | |
| HCQCI06 | 915000 | 220 | HMMER | PFAM: Fibronectin type | PF00041 | 24.42 | 6 | 191 |
| | | | 1.8 | III domain | | | | |
| | | | blastx.2 | hypothetical protein | pir\|T17344\|T17344 | 99% | 3 | 596 |
| | | | | DKFZp586L2024.1 - | | 100% | 593 | 646 |
| | | | | human (fragment) | | | | |
| HE8EI09 | 915042 | 398 | HMMER | PFAM: IG | PF00047 | 5.24 | 140 | 322 |
| | | | 1.8 | (immunoglobulin) | | | | |
| | | | | superfamily | | | | |
| | | | blastx | (AF153362) adenylyl | gb\|AAD50121.1\|AF1 | 35% | 182 | 493 |
| | | | | cyclase [Dictyostelium | 53362_1 | 34% | 188 | 493 |
| | | | | discoideum] | | 40% | 182 | 436 |
| | | | | | | 31% | 179 | 493 |
| | | | | | | 33% | 182 | 493 |
| | | | | | | 29% | 101 | 223 |
| | | | | | | 53% | 179 | 223 |
| | | | | | | 40% | 164 | 223 |
| | | | | | | 47% | 170 | 220 |
| HBODA38 | 923456 | 222 | HMMER | PFAM: Fibronectin type | PF00041 | 31.21 | 418 | 648 |
| | | | 1.8 | III domain | | | | |
| | | | blastx.2 | Stretch response protein | sp\|CAC08495\|CAC0 | 90% | 853 | 1470 |
| | | | | 553 (Fragment). | 8495 | | | |
| HCYBK19 | 925494 | 223 | HMMER | PFAM: Fibronectin type | PF00041 | 26.97 | 368 | 658 |
| | | | 1.8 | III domain | | | | |
| | | | blastx.2 | hypothetical protein | pir\|T23642\|T23642 | 32% | 596 | 1336 |
| | | | | M01B2.10 - | | | | |
| | | | | Caenorhabditis elegans | | | | |
| HOFNH30 | 928365 | 224 | HMMER | PFAM: 7 transmembrane | PF00001 | 24.58 | 9 | 248 |
| | | | 1.8 | receptor (rhodopsin | | | | |
| | | | | family) | | | | |
| | | | blastx.2 | CALCIUM- | sp\|Q9UBY5\|Q9UBY | 75% | 18 | 263 |
| | | | | MOBILIZING | 5 | 54% | 265 | 375 |
| | | | | LYSOPHOSPHATIDIC | | | | |
| | | | | ACID RECEPTOR 1 | | | | |
| HWMEV63 | 931154 | 225 | HMMER | PFAM: 7 transmembrane | PF00001 | 53.4 | 2 | 262 |
| | | | 2.1.1 | receptor (rhodopsin | | | | |
| | | | | family) | | | | |
| | | | blastx.2 | 7 transmembrane G- | sp\|AAG09275\|AAG0 | 75% | 2 | 391 |
| | | | | protein coupled receptor. | 9275 | | | |
| HUUDH57 | 1156174 | 226 | blastx.14 | (AF106037) adipocyte- | gi\|6381989\|gb\|AAF07 | 56% | 20 | 1012 |
| | | | | derived leucine | 395.1\|AF106037_1 | 46% | 1055 | 2170 |
| | | | | aminopeptidase [Homo | | | | |
| | | | | sapiens] | | | | |
| HUUDH57 | 931155 | 399 | HMMER | PFAM: Peptidase family | PF01433 | 378.5 | 23 | 661 |
| | | | 2.1.1 | M1 | | | | |
| | | | blastx.2 | ADIPOCYTE-DERIVED | sp\|Q9UKY2\|Q9UKY | 51% | 2 | 2155 |
| | | | | LEUCINE | 2 | | | |
| | | | | AMINOPEPTIDASE. | | | | |
| HDQFT77 | 1157001 | 227 | blastx.14 | (AF078164) Ku70- | gi\|4867999\|gb\|AAD3 | 95% | 42 | 902 |
| | | | | binding protein [Homo | 1085.1\|AF078164_1 | | | |
| | | | | sapiens] | | | | |
| HDQFT77 | 932212 | 400 | HMMER | PFAM: Zinc-binding | PF00099 | 13.41 | 496 | 534 |
| | | | 1.8 | metalloprotease domain | | | | |
| | | | blastx.14 | (AF078164) Ku70- | gi\|4867999\|gb\|AAD3 | 95% | 13 | 873 |
| | | | | binding protein [Homo | 1085.1\|AF078164_1 | | | |
| | | | | sapiens] | | | | |
| HBXBG65 | 932780 | 228 | HMMER | PFAM: Cytochrome P450 | PF00067 | 46.55 | 2 | 535 |
| | | | 1.8 | | | | | |
| | | | blastx.2 | CHOLESTEROL 24- | sp\|Q9Y6A2\|Q9Y6A2 | 98% | 2 | 535 |
| | | | | HYDROXYLASE. | | | | |
| HMVDZ78 | 938574 | 229 | HMMER | PFAM: IPT/TIG domain | PF01833 | 52.6 | 104 | 244 |
| | | | 2.1.1 | | | | | |
| HE8PB92 | 940805 | 402 | HMMER | PFAM: Leucine rich | PF01463 | 40.2 | 122 | 265 |
| | | | 2.1.1 | repeat C-terminal domain | | | | |
| | | | blastx | (AL022270) Similarity to | emb\|CAB63434.1\| | 36% | 2 | 265 |
| | | | | Drosophila EGF-like | | 30% | 2 | 292 |
| | | | | protein slit (PIR 1 1 gene; | | 55% | 292 | 318 |
| | | | | cDNA EST yk322h11.3 | | | | |
| | | | | comes from this gene | | | | |
| | | | | [Caenor | | | | |
| HSDHB12 | 941973 | 231 | HMMER | PFAM: Fibronectin type | PF00041 | 110.6 | 156 | 416 |
| | | | 2.1.1 | III domain | | | | |
| | | | blastx.2 | 165K protein, skeletal | pir\|S43529\|S43529 | 49% | 15 | 635 |
| | | | | muscle - human | | 29% | 3 | 536 |
| | | | | | | 32% | 33 | 443 |
| | | | | | | 29% | 36 | 446 |
| | | | | | | 40% | 156 | 446 |
| HSDHB12 | 969094 | 403 | HMMER | PFAM: Fibronectin type | PF00041 | 14.26 | 15 | 65 |
| | | | 1.8 | III domain | | | | |
| | | | blastx.14 | 165kD protein [Homo | gi\|407097\|emb\|CAA4 | 48% | 15 | 278 |
| | | | | sapiens] | 8832.1\| | | | |
| HSDHB12 | 969097 | 404 | HMMER | PFAM: Fibronectin type | PF00041 | 110.6 | 691 | 431 |
| | | | 2.1.1 | III domain | | | | |
| | | | blastx.14 | 165kD protein [Homo | gi\|407097\|emb\|CAA4 | 49% | 754 | 212 |
| | | | | sapiens] | 8832.1\| | 34% | 691 | 401 |
| | | | | | | 32% | 691 | 419 |
| | | | | | | 30% | 592 | 404 |
| | | | | | | 50% | 508 | 401 |
| | | | | | | 50% | 691 | 596 |
| | | | | | | 78% | 206 | 165 |
| | | | | | | 45% | 691 | 620 |
| | | | | | | 47% | 136 | 68 |
| | | | | | | 40% | 92 | 27 |
| | | | | | | 32% | 221 | 147 |
| HE8UL90 | 942749 | 232 | HMMER | PFAM: EGF-like domain | PF00008 | 63.9 | 297 | 398 |
| | | | 2.1.1 | | | | | |
| | | | blastx.2 | CRUMBS HOMOLOG 1. | sp\|P82279\|P82279 | 85% | 78 | 566 |
| | | | | | | 36% | 153 | 566 |
| | | | | | | 33% | 156 | 566 |
| | | | | | | 32% | 156 | 575 |
| | | | | | | 34% | 156 | 566 |
| | | | | | | 32% | 156 | 512 |
| | | | | | | 34% | 156 | 521 |
| | | | | | | 31% | 156 | 452 |
| | | | | | | 36% | 237 | 518 |
| | | | | | | 32% | 177 | 512 |
| | | | | | | 32% | 156 | 410 |
| | | | | | | 53% | 541 | 732 |
| | | | | | | 42% | 533 | 688 |
| | | | | | | 37% | 414 | 566 |
| | | | | | | 34% | 246 | 428 |
| | | | | | | 37% | 544 | 663 |
| | | | | | | 42% | 607 | 663 |
| | | | | | | 36% | 156 | 230 |
| | | | | | | 38% | 604 | 666 |
| | | | | | | 28% | 547 | 663 |
| | | | | | | 35% | 604 | 663 |
| | | | | | | 33% | 604 | 666 |
| | | | | | | 44% | 610 | 663 |
| | | | | | | 29% | 533 | 682 |
| | | | | | | 46% | 566 | 601 |
| | | | | | | 31% | 417 | 512 |
| HTXAA15 | 1200485 | 233 | blastx.14 | hypothetical protein | pir\|T33161\|T33161 | 34% | 98 | 226 |
| | | | | K03E5.1 - Caenorhabditis | | 52% | 209 | 310 |
| | | | | elegans | | 48% | 317 | 415 |
| | | | | | | 27% | 2299 | 2418 |
| HTXAA15 | 943266 | 405 | HMMER | PFAM: CUB domain | PF00431 | 97.11 | 53 | 286 |
| | | | 1.8 | | | | | |
| | | | blastx.14 | (AF034611) intrinsic | gi\|3929529\|gb\|AAC8 | 40% | 77 | 286 |
| | | | | factor-B12 receptor | 2612.1\| | 34% | 53 | 286 |
| | | | | precursor; cubilin [Homo | | 35% | 11 | 274 |
| | | | | sapiens] | | 47% | 83 | 190 |
| | | | | | | 50% | 83 | 184 |
| | | | | | | 44% | 71 | 184 |
| | | | | | | 35% | 65 | 184 |
| | | | | | | 45% | 155 | 286 |
| | | | | | | 35% | 65 | 190 |
| | | | | | | 35% | 71 | 196 |
| | | | | | | 27% | 74 | 202 |
| | | | | | | 41% | 200 | 286 |
| | | | | | | 33% | 83 | 190 |
| | | | | | | 40% | 83 | 187 |
| | | | | | | 44% | 200 | 286 |
| | | | | | | 30% | 83 | 202 |
| | | | | | | 29% | 65 | 187 |
| | | | | | | 34% | 200 | 286 |
| | | | | | | 26% | 56 | 181 |
| | | | | | | 41% | 200 | 286 |
| | | | | | | 35% | 194 | 286 |
| | | | | | | 41% | 200 | 286 |
| | | | | | | 40% | 95 | 154 |
| | | | | | | 47% | 188 | 250 |
| | | | | | | 29% | 83 | 184 |
| | | | | | | 53% | 83 | 127 |
| | | | | | | 32% | 116 | 190 |
| | | | | | | 36% | 194 | 250 |
| | | | | | | 47% | 200 | 250 |
| | | | | | | 25% | 20 | 91 |
| | | | | | | 50% | 227 | 268 |
| | | | | | | 26% | 209 | 286 |
| | | | | | | 35% | 29 | 70 |
| | | | | | | 28% | 112 | 174 |
| HOFMP09 | 943358 | 406 | HMMER | PFAM: Immunoglobulin | PF00047 | 27.5 | 34 | 144 |
| | | | 2.1.1 | domain | | | | |
| | | | blastx | B-CAM [Homo sapiens] | emb\|CAA56327.1\| | 76% | 31 | 351 |
| | | | | | | 49% | 300 | 494 |
| | | | | | | 85% | 473 | 553 |
| | | | | | | 33% | 247 | 372 |
| | | | | | | 46% | 283 | 327 |
| | | | | | | 43% | 91 | 138 |
| HFPEL47 | 943750 | 407 | HMMER | PFAM: Immunoglobulin | PF00047 | 31.4 | 135 | 365 |
| | | | 2.1.1 | domain | | | | |
| | | | blastx | (AJ243874) oligophrenin- | emb\|CAB56046.1\| | 99% | 3 | 596 |
| | | | | 4 [Homo sapiens] | | 53% | 618 | 695 |
| | | | | | | 100% | 595 | 630 |
| HFIHF63 | 944246 | 408 | HMMER | PFAM: Immunoglobulin | PF00047 | 22.4 | 92 | 364 |
| | | | 2.1.1 | domain | | | | |
| HCE1I41 | 1156227 | 237 | blastx.14 | (AL137451) hypothetical | gi\|6808026\|emb\|CAB | 66% | 313 | 828 |
| | | | | protein [Homo sapiens] | 70743.1\| | 62% | 835 | 1035 |
| | | | | | | 56% | 1204 | 1425 |
| | | | | | | 37% | 1 | 234 |
| | | | | | | 35% | 43 | 234 |
| | | | | | | 36% | 1 | 174 |
| | | | | | | 37% | 259 | 339 |
| | | | | | | 42% | 247 | 303 |
| | | | | | | 75% | 348 | 371 |
| HCE1I41 | 944433 | 410 | HMMER | PFAM: Leucine rich | PF01463 | 37.6 | 595 | 750 |
| | | | 2.1.1 | repeat C-terminal domain | | | | |
| | | | blastx.2 | (AL137451) hypothetical | emb\|CAB70743.1\| | 63% | 346 | 1032 |
| | | | | protein [Homo sapiens] | 81% | 311 | 343 | |
| HHAUD86 | 944835 | 411 | HMMER | PFAM: Immunoglobulin | PF00047 | 27.7 | 222 | 509 |
| | | | 2.1.1 | domain | | | | |
| | | | blastx | (AJ007041) trithorax | emb\|CAB45385.1\| | 37% | 327 | 199 |
| | | | | homologue 2 [Homo | | 47% | 396 | 328 |
| | | | | sapiens] | | 37% | 460 | 389 |
| | | | | | | 75% | 87 | 64 |
| | | | | | | 85% | 84 | 64 |
| | | | | | | 53% | 144 | 106 |
| | | | | | | 58% | 153 | 118 |
| | | | | | | 50% | 444 | 397 |
| | | | | | | 70% | 216 | 187 |
| | | | | | | 70% | 39 | 10 |
| | | | | | | 75% | 87 | 64 |
| | | | | | | 40% | 552 | 493 |
| | | | | | | 58% | 169 | 134 |
| | | | | | | 54% | 216 | 184 |
| | | | | | | 83% | 81 | 64 |
| | | | | | | 42% | 123 | 67 |
| | | | | | | 42% | 336 | 295 |
| | | | | | | 31% | 477 | 382 |
| HFKKE19 | 947418 | 239 | HMMER | PFAM: EGF-like domain | PF00008 | 19.3 | 40 | 201 |
| | | | 1.8 | | | | | |
| | | | blastx.2 | MEGF3 (FRAGMENT). | sp\|Q9QYP2\|Q9QYP2 | 98% | 1 | 249 |
| | | | | | | 78% | 233 | 289 |
| | | | | | | 28% | 248 | 289 |
| HLWAR77 | 947484 | 240 | HMMER | PFAM: 7 transmembrane | PF00001 | 214.2 | 1287 | 553 |
| | | | 1.8 | receptor (rhodopsin | | | | |
| | | | | family) | | | | |
| | | | blastx.2 | G-protein coupled | sp\|AAF87078\|AAF87 | 100% | 1287 | 292 |
| | | | | receptor HLWAR77. | 078 | | | |
| HWAFW39 | 947915 | 412 | HMMER | PFAM: Peptidase family | PF01433 | 79.5 | 200 | 367 |
| | | | 2.1.1 | M1 | | | | |
| | | | blastx.2 | ADIPOCYTE-DERIVED | sp\|Q9UKY2\|Q9UKY | 96% | 200 | 367 |
| | | | | LEUCINE | 2 | | | |
| | | | | AMINOPEPTIDASE. | | | | |
| HBCBF11 | 1204933 | 242 | blastx.14 | Cell adhesion molecule | sp\|AAF63685\|AAF63 | 36% | 6 | 203 |
| | | | | nectin-3 alpha. | 685 | 46% | 351 | 446 |
| | | | | | | 50% | 216 | 275 |
| | | | | | | 44% | 267 | 347 |
| HBCBF11 | 947959 | 413 | HMMER | PFAM: Immunoglobulin | PF00047 | 23.7 | 221 | 385 |
| | | | 2.1.1 | domain | | | | |
| | | | blastx.2 | (AL050071) hypothetical | emb\|CAB43256.1\| | 40% | 5 | 439 |
| | | | | protein [Homo sapiens] | | | | |
| HHFME38 | 947970 | 243 | HMMER | PFAM: IG | PE00047 | 31.1 | 203 | 391 |
| | | | 1.8 | (immunoglobulin) | | | | |
| | | | | superfamily | | | | |
| | | | blastx.2 | (AL049946) hypothetical | emb\|CAB43220.1 | 34% | 11 | 451 |
| | | | | protein [Homo sapiens] | | 31% | 8 | 571 |
| | | | | | | 32% | 2 | 436 |
| | | | | | | 30% | 11 | 460 |
| | | | | | | 27% | 185 | 556 |
| | | | | | | 33% | 448 | 546 |
| HBJHS02 | 1156166 | 244 | blastx.14 | FcRI b form (AA 1-344) | gi\|31334\|emb\|CAA32 | 53% | 75 | 362 |
| | | | | [Homo sapiens] | 536.1\| | | | |
| HBJHS02 | 948293 | 414 | HMMER | PFAM: Immunoglobulin | PF00047 | 21 | 130 | 303 |
| | | | 2.1.1 | domain | | | | |
| | | | blastx.2 | Fc gamma (IgG) receptor | pir\|A39878\|A39878 | 53% | 76 | 363 |
| | | | | I-A (high affinity) | | | | |
| | | | | precursor - human | | | | |
| HCE3J64 | 1216650 | 245 | blastx.14 | ENDOTHELIN- | sp\|O60344\|ECE2_HU | 100% | 3 | 848 |
| | | | | CONVERTING | MAN | 47% | 42 | 92 |
| | | | | ENZYME 2 (EC | | | | |
| | | | | 3.4.24.71) (ECE-2) 1 | | | | |
| HCE3J64 | 951228 | 416 | HMMER | PFAM: Peptidase family | PF01431 | 154.1 | 234 | 563 |
| | | | 2.1.1 | M13 | | | | |
| | | | blastx.2 | ENDOTHELIN- | sp\|O60344\|ECE2_HU | 94% | 3 | 599 |
| | | | | CONVERTING | MAN | 59% | 557 | 688 |
| | | | | ENZYME 2 (EC | | | | |
| | | | | 3.4.24.71) (ECE-2) 1 | | | | |
| HFKHD91 | 1129627 | 246 | blastx.14 | (AF131842) Unknown | gi\|4406683\|gb\|AAD2 | 52% | 1251 | 1093 |
| | | | | [Homo sapiens] | 0057.1\| | 60% | 1362 | 1279 |
| HFKHD91 | 951259 | 417 | HMMER | PFAM: EGF-like domain | PF00008 | 28.84 | 119 | 211 |
| | | | 1.8 | | | | | |
| | | | blastx.2 | Netrin-Glc. | sp\|BAB12008\|BAB1 | 93% | 2 | 286 |
| | | | | | 2008 | | | |
| HDAAN31 | 1204979 | 247 | blastx.14 | COXSACKIEVIRUS | sp\|P78310\|CXAR_H | 36% | 397 | 690 |
| | | | | AND ADENOVIRUS | UMAN | 44% | 1165 | 1278 |
| | | | | RECEPTOR | | 46% | 289 | 384 |
| | | | | PRECURSOR 1 | | 41% | 16 | 132 |
| | | | | PROTEIN). | | 31% | 148 | 234 |
| | | | | | | 37% | 286 | 357 |
| | | | | | | 25% | 580 | 684 |
| HDAAN31 | 951450 | 418 | HMMER | PFAM: Immunoglobulin | PF00047 | 30 | 109 | 366 |
| | | | 2.1.1 | domain | | | | |
| | | | blastx.2 | coxsackie and adenovirus | emb\|CAA68868.1\| | 35% | 58 | 741 |
| | | | | receptor protein [Homo | | | | |
| | | | | sapiens] | | | | |
| HE8AM92 | 952610 | 419 | HMMER | PFAM: Alcohol/other | PF00106 | 8.98 | 202 | 330 |
| | | | 1.8 | dehydrogenases, short | | | | |
| | | | | chain type | | | | |
| | | | blastx.2 | DTDP-4-KETO-6- | sp\|Q9UJ54\|Q9UJ54 | 90% | 208 | 654 |
| | | | | DEOXY-D-GLUCOSE 4- | | | | |
| | | | | REDUCTASE. | | | | |
| HSXBF22 | 952744 | 249 | HMMER | PFAM: Extracellular link | PF00193 | 155.1 | 699 | 983 |
| | | | 2.1.1 | domain | | | | |
| | | | blastx.2 | cartilage link protein | emb\|CAA35462.1\| | 41% | 312 | 989 |
| | | | | [Homo sapiens] | | 50% | 1006 | 1269 |
| | | | | | | 47% | 1024 | 1278 |
| HSXBF22 | 952874 | 420 | HMMER | PFAM: Extracellular link | PF00193 | 155.1 | 699 | 983 |
| | | | 2.1.1 | domain | | | | |
| | | | blastx.14 | cartilage link protein | gi\|34378\|emb\|CAA35 | 47% | 426 | 884 |
| | | | | [Homo sapiens] | 462.1\| | 56% | 1007 | 1192 |
| | | | | | | 67% | 1115 | 1198 |
| | | | | | | 68% | 828 | 884 |
| | | | | | | 30% | 312 | 458 |
| | | | | | | 42% | 933 | 1016 |
| | | | | | | 37% | 1208 | 1279 |
| | | | | | | 42% | 1025 | 1108 |
| | | | | | | 35% | 738 | 821 |
| | | | | | | 40% | 1205 | 1270 |
| HUSXE73 | 1125845 | 250 | blastx.14 | (AF186111) NOTCH4- | gi\|6014628\|gb\|AAF01 | 100% | 1203 | 700 |
| | | | | like protein [Homo | 429.1\|AF186111_1 | 95% | 1321 | 1199 |
| | | | | sapiens] | | | | |
| HUSXE73 | 953246 | 421 | HMMER | PFAM: EGF-like domain | PF00008 | 39.2 | 466 | 573 |
| | | | 2.1.1 | | | | | |
| | | | blastx.2 | NOTCH4-LIKE | sp\|Q9UHF1\|Q9UHF1 | 100% | 361 | 864 |
| | | | | PROTEIN. | | 65% | 243 | 473 |
| HNFCS26 | 899406 | 251 | HMMER | PFAM: 7 transmembrane | PF00002 | 249.7 | 146 | 853 |
| | | | 2.1.1 | receptor (Secretin family) | | | | |
| | | | blastx.2 | (AC004262) R29368_2 | gb\|AAC05172.1\| | 81% | 137 | 955 |
| | | | | [Homo sapiens] | | | | |
| HNFCS26 | 956682 | 422 | blastx.2 | (AC004262) R29368_2 | gb\|AAC05172.1\| | 80% | 324 | 554 |
| | | | | [Homo sapiens] | | 90% | 169 | 324 |
| | | | | | | 52% | 208 | 267 |
| | | | | | | 56% | 143 | 190 |
| HNFCS26 | 956684 | 424 | HMMER | PFAM: Latrophilin/CL-1- | PF01825 | 23.7 | 1282 | 1151 |
| | | | 2.1.1 | like GPS domain | | | | |
| | | | blastx.2 | (AF114491) EGF-like | gb\|AAF21974.1\|AF1 | 81% | 1109 | 1978 |
| | | | | module EMR2 [Homo | 14491_1 | 48% | 75 | 419 |
| | | | | sapiens] | | 25% | 159 | 1088 |
| | | | | | | 31% | 132 | 425 |
| | | | | | | 29% | 153 | 443 |
| | | | | | | 70% | 1341 | 1370 |
| HWLXTA8 | 957630 | 252 | HMMER | PFAM: Alcohol/other | PF00106 | 46.57 | 133 | 306 |
| | | | 1.8 | dehydrogenases, short | | | | |
| | | | | chain type | | | | |
| | | | blastx.2 | CDNA FLJ11008 FIS, | sp\|BAA91953\|BAA9 | 83% | 58 | 333 |
| | | | | CLONE PLACE1003100, | 1953 | 94% | 309 | 359 |
| | | | | MODERATELY | | | | |
| | | | | SIMILAR 1 | | | | |
| HBCPT10 | 957631 | 253 | HMMER | PFAM: Alcohol/other | PF00106 | 98.87 | 338 | 673 |
| | | | 1.8 | dehydrogenases, short | | | | |
| | | | | chain type | | | | |
| | | | blastx.2 | CDNA FLJ11008 FIS, | sp\|BAA91953\|BAA9 | 97% | 263 | 670 |
| | | | | CLONE PLACE1003100, | 1953 | 80% | 671 | 838 |
| | | | | MODERATELY | | | | |
| | | | | SIMILAR 1 | | | | |
| HETKR83 | 963274 | 254 | HMMER | PFAM: EGF-like domain | PF00008 | 41.8 | 236 | 319 |
| | | | 2.1.1 | | | | | |
| | | | blastx.2 | Wnt inhibitory factor-1 - | pir\|A59180\|A59180 | 88% | 20 | 445 |
| | | | | human | | 35% | 20 | 325 |
| | | | | | | 34% | 29 | 319 |
| HEBGK01 | 1229764 | 255 | blastx.14 | C380A1.2.1 (NOVEL | sp\|Q9UJH9\|Q9UJH9 | 89% | 208 | 783 |
| | | | | PROTEIN (ISOFORM | | | | |
| | | | | 1)). | | | | |
| HEBGK01 | 963673 | 425 | HMMER | PFAM: Zinc-binding | PF00099 | 4.13 | 426 | 391 |
| | | | 1.8 | metalloprotease domain | | | | |
| | | | blastx.2 | C380A1.2.1 (NOVEL | sp\|Q9UJH9\|Q9UJH9 | 81% | 441 | 112 |
| | | | | PROTEIN (ISOFORM | | 85% | 743 | 540 |
| | | | | 1)). | | 100% | 540 | 502 |
| HAPBS07 | 967325 | 256 | HMMER | PFAM: Alcohol/other | PF00106 | 50.05 | 61 | 267 |
| | | | 1.8 | dehydrogenases, short | | | | |
| | | | | chain type | | | | |
| | | | blastx.2 | RETINOL | sp\|Q9Y2P9\|Q9Y2P9 | 75% | 317 | 682 |
| | | | | DEHYDROGENASE | | 69% | 61 | 306 |
| | | | | HOMOLOG. | | 62% | 580 | 708 |
| | | | | | | 34% | 561 | 683 |
| HWLPR94 | 967326 | 257 | HMMER | PFAM: Alcohol/other | PF00106 | 44.2 | 193 | 417 |
| | | | 1.8 | dehydrogenases, short | | | | |
| | | | | chain type | | | | |
| | | | blastx.2 | RETINOL | sp\|Q9Y2P9\|Q9Y2P9 | 95% | 184 | 450 |
| | | | | DEHYDROGENASE | | 84% | 36 | 134 |
| | | | | HOMOLOG. | | | | |
| HE6GK65 | 1128005 | 258 | blastx.14 | (AC004010) similar to | gi\|2781386\|gb\|AAB9 | 34% | 147 | 422 |
| | | | | Leucine-rich | 6869.1\| | 48% | 9 | 119 |
| | | | | transmembrane 1 | | 26% | 549 | 707 |
| | | | | | | 64% | 921 | 971 |
| | | | | | | 88% | 729 | 755 |
| | | | | | | 66% | 144 | 179 |
| | | | | | | 28% | 12 | 158 |
| HE6GK65 | 969661 | 426 | HMMER | PFAM: Immunoglobulin | PF00047 | 20.7 | 463 | 648 |
| | | | 2.1.1 | domain | | | | |
| | | | blastx | (AC004010) similar to | gb\|AAB96869.1\| | 33% | 139 | 414 |
| | | | | Leucine-rich | | 64% | 721 | 813 |
| | | | | transmembrane proteins; | | 48% | 1 | 111 |
| | | | | 44% 1 | | 26% | 541 | 699 |
| | | | | | | 32% | 814 | 963 |
| | | | | | | 50% | 760 | 813 |
| | | | | | | 37% | 148 | 243 |
| | | | | | | 66% | 136 | 171 |
| | | | | | | 28% | 4 | 150 |
| HAPOI67 | 971184 | 259 | HMMER | PFAM: 7 transmembrane | PF00002 | 280.3 | 1084 | 1842 |
| | | | 2.1.1 | receptor (Secretin family) | | | | |
| | | | blastx.2 | (AF114491) EGF-like | gb\|AAF21974.1\|AF1 | 52% | 124 | 1944 |
| | | | | module EMR2 [Homo | 14491_1 | 48% | 40 | 384 |
| | | | | sapiens] | | 70% | 1307 | 1336 |
| HE8NI05 | 971303 | 427 | HMMER | PFAM: Low-density | PF00057 | 59.46 | 307 | 417 |
| | | | 1.8 | lipoprotein receptor | | | | |
| | | | | domain class A | | | | |
| | | | blastx.2 | (AF166350) ST7 protein | gb\|AAD44360.1\|AF1 | 97% | 106 | 597 |
| | | | | [Homo sapiens] | 66350_1 | 45% | 193 | 411 |
| | | | | | | 48% | 283 | 411 |
| | | | | | | 43% | 632 | 766 |
| | | | | | | 52% | 579 | 653 |
| | | | | | | 39% | 118 | 186 |
| HHENW06 | 971310 | 261 | HMMER | PFAM: EGF-like domain | PF00008 | 35.6 | 852 | 965 |
| | | | 2.1.1 | | | | | |
| | | | blastx.2 | hypothetical protein | pir\|T17298\|T17298 | 98% | 17 | 334 |
| | | | | DKFZp586M2123.1 - | | 85% | 840 | 1181 |
| | | | | human (fragment) | | 38% | 786 | 1106 |
| | | | | | | 38% | 32 | 331 |
| | | | | | | 85% | 488 | 583 |
| | | | | | | 32% | 870 | 1181 |
| | | | | | | 39% | 798 | 1085 |
| | | | | | | 41% | 840 | 1049 |
| | | | | | | 40% | 783 | 938 |
| | | | | | | 26% | 840 | 1187 |
| | | | | | | 36% | 26 | 172 |
| | | | | | | 42% | 23 | 148 |
| | | | | | | 32% | 29 | 193 |
| | | | | | | 30% | 74 | 193 |
| | | | | | | 40% | 975 | 1049 |
| HNTAV78 | 971315 | 262 | HMMER | PFAM: 7 transmembrane | PF00001 | 23.92 | 3 | 143 |
| | | | 1.8 | receptor (rhodopsin | | | | |
| | | | | family) | | | | |
| | | | blastx.2 | Cysteinyl leukotriene | sp\|BAB03601\|BAB0 | 100% | 3 | 266 |
| | | | | CysLT2 receptor. | 3601 | | | |
| HMVCP64 | 1027019 | 263 | blastx.14 | dJ526I14.3a (fragment of | gi\|5911823\|emb\|CAB | 79% | 13 | 384 |
| | | | | novel CUB and EGF-like | 55887.1\| | | | |
| | | | | domain protein) [Homo | | | | |
| | | | | sapiens] | | | | |
| HMVCP64 | 971620 | 428 | HMMER | PFAM: CUB domain | PF00431 | 80.61 | 465 | 794 |
| | | | 1.8 | | | | | |
| | | | blastx.14 | dJ526I14.3a (fragment of | gi\|5911823\|emb\|CAB | 79% | 423 | 794 |
| | | | | novel CUB and EGF-like | 55887.1\| | | | |
| | | | | domain protein) [Homo | | | | |
| | | | | sapiens] | | | | |
| HE8UT58 | 973153 | 264 | HMMER | PFAM: Fibronectin type | PF00041 | 15.44 | 72 | 191 |
| | | | 1.8 | III domain | | | | |
| | | | blastx.2 | ASTROTACTIN2. | sp\|Q9QY74\|Q9QY74 | 96% | 3 | 662 |
| HDPBI30 | 974711 | 265 | HMMER | PFAM: 7 transmembrane | PF00001 | 171.31 | 386 | 1096 |
| | | | 1.8 | receptor (rhodopsin | | | | |
| | | | | family) | | | | |
| | | | blastx.2 | G PROTEIN-COUPLED | sp\|Q9UNW8\|Q9UN | 93% | 206 | 1312 |
| | | | | RECEPTOR. | W8 | | | |
| HNECM88 | 1128027 | 266 | blastx.14 | OB binding protein-2 | gi\|2411475\|gb\|AAB7 | 93% | 5 | 295 |
| | | | | [Homo sapiens] | 0703.1\| | 50% | 320 | 580 |
| | | | | | | 30% | 368 | 475 |
| | | | | | | 24% | 86 | 196 |
| HNECM88 | 974717 | 429 | HMMER | PFAM: Immunoglobulin | PF00047 | 28.3 | 364 | 438 |
| | | | 2.1.1 | domain | | | | |
| | | | blastx | OB binding protein-2 | gb\|AAB70703.1\| | 94% | 4 | 288 |
| | | | | [Homo sapiens] | | 48% | 313 | 510 |
| | | | | | | 33% | 402 | 572 |
| | | | | | | 30% | 361 | 468 |
| HFXJI27 | 975381 | 430 | HMMER | PFAM: Fibronectin type | PF00041 | 22 | 21 | 110 |
| | | | 2.1.1 | III domain | | | | |

[0049] Table 2 further characterizes certain encoded polypeptides of the invention, by providing the results of comparisons to protein and protein family databases. The first column provides a unique clone identifier, “Clone ID NO:”, corresponding to a cDNA clone disclosed in Table 1A. The second column provides the unique contig identifier, “Contig ID:” which allows correlation with the information in Table 1A. The third column provides the sequence identifier, “SEQ ID NO:”, for the contig polynucleotide sequences. The fourth column provides the analysis method by which the homology/identity disclosed in the Table was determined. The fifth column provides a description of the PFAM/NR hit identified by each analysis. Column six provides the accession number of the PFAM/NR hit disclosed in the fifth column. Column seven, score/percent identity, provides a quality score or the percent identity, of the hit disclosed in column five. Comparisons were made between polypeptides encoded by polynucleotides of the invention and a non-redundant protein database (herein referred to as “NR”), or a database of protein families (herein referred to as “PFAM”), as described below.

[0050] The NR database, which comprises the NBRF PIR database, the NCBI GenPept database, and the SIB SwissProt and TrEMBL databases, was made non-redundant using the computer program nrdb2 (Warren Gish, Washington University in Saint Louis). Each of the polynucleotides shown in Table 1A, column 3 (e.g., SEQ ID NO:X or the ‘Query’ sequence) was used to search against the NR database. The computer program BLASTX was used to compare a 6-frame translation of the Query sequence to the NR database (for information about the BLASTX algorithm please see Altshul et al., J. Mol. Biol. 215:403-410 (1990); and Gish and States, Nat. Genet. 3:266-272 (1993). A description of the sequence that is most similar to the Query sequence (the highest scoring ‘Subject’) is shown in column five of Table 2 and the database accession number for that sequence is provided in column six. The highest scoring ‘Subject’ is reported in Table 2 if (a) the estimated probability that the match occurred by chance alone is less than 1.0e-07, and (b) the match was not to a known repetitive element. BLASTX returns alignments of short polypeptide segments of the Query and Subject sequences which share a high degree of similarity; these segments are known as High-Scoring Segment Pairs or HSPs. Table 2 reports the degree of similarity between the Query and the Subject for each HSP as a percent identity in Column 7. The percent identity is determined by dividing the number of exact matches between the two aligned sequences in the HSP, dividing by the number of Query amino acids in the HSP and multiplying by 100. The polynucleotides of SEQ ID NO:X which encode the polypeptide sequence that generates an HSP are delineated by columns 8 and 9 of Table 2.

[0051] The PFAM database, PFAM version 2.1, (Sonnhammer et al., Nucl. Acids Res., 26:320-322, 1998)) consists of a series of multiple sequence alignments; one alignment for each protein family. Each multiple sequence alignment is converted into a probability model called a Hidden Markov Model, or HMM, that represents the position-specific variation among the sequences that make up the multiple sequence alignment (see, e.g., Durbin et al., Biological sequence analysis: probabilistic models of proteins and nucleic acids, Cambridge University Press, 1998 for the theory of HMMs). The program HMMER version 1.8 (Sean Eddy, Washington University in Saint Louis) was used to compare the predicted protein sequence for each Query sequence (SEQ ID NO:Y in Table 1A) to each of the HMMs derived from PFAM version 2.1. A HMM derived from PFAM version 2.1 was said to be a significant match to a polypeptide of the invention if the score returned by HMMER 1.8 was greater than 0.8 times the HMMER 1.8 score obtained with the most distantly related known member of that protein family. The description of the PFAM family which shares a significant match with a polypeptide of the invention is listed in column 5 of Table 2, and the database accession number of the PFAM hit is provided in column 6. Column 7 provides the score returned by HMMER version 1.8 for the alignment. Columns 8 and 9 delineate the polynucleotides of SEQ ID NO:X which encode the polypeptide sequence which show a significant match to a PFAM protein family.

[0052] As mentioned, columns 8 and 9 in Table 2, “NT From” and “NT To”, delineate the polynucleotides of “SEQ ID NO:X” that encode a polypeptide having a significant match to the PFAM/NR database as disclosed in the fifth column. In one embodiment, the invention provides a protein comprising, or alternatively consisting of, a polypeptide encoded by the polynucleotides of SEQ ID NO:X delineated in columns 8 and 9 of Table 2. Also provided are polynucleotides encoding such proteins, and the complementary strand thereto.

[0053] The nucleotide sequence SEQ ID NO:X and the translated SEQ ID NO:Y are sufficiently accurate and otherwise suitable for a variety of uses well known in the art and described further below. For instance, the nucleotide sequences of SEQ ID NO:X are useful for designing nucleic acid hybridization probes that will detect nucleic acid sequences contained in SEQ ID NO:X or the cDNA contained in Clone ID NO:Z. These probes will also hybridize to nucleic acid molecules in biological samples, thereby enabling immediate applications in chromosome mapping, linkage analysis, tissue identification and/or typing, and a variety of forensic and diagnostic methods of the invention. Similarly, polypeptides identified from SEQ ID NO:Y may be used to generate antibodies which bind specifically to these polypeptides, or fragments thereof, and/or to the polypeptides encoded by the cDNA clones identified in, for example, Table 1A.

[0054] Nevertheless, DNA sequences generated by sequencing reactions can contain sequencing errors. The errors exist as misidentified nucleotides, or as insertions or deletions of nucleotides in the generated DNA sequence. The erroneously inserted or deleted nucleotides cause frame shifts in the reading frames of the predicted amino acid sequence. In these cases, the predicted amino acid sequence diverges from the actual amino acid sequence, even though the generated DNA sequence may be greater than 99.9% identical to the actual DNA sequence (for example, one base insertion or deletion in an open reading frame of over 1000 bases).

[0055] Accordingly, for those applications requiring precision in the nucleotide sequence or the amino acid sequence, the present invention provides not only the generated nucleotide sequence identified as SEQ ID NO:X, and a predicted translated amino acid sequence identified as SEQ ID NO:Y, but also a sample of plasmid DNA containing cDNA Clone ID NO:Z (deposited with the ATCC on Oct. 5, 2000, and receiving ATCC designation numbers PTA 2574 and PTA 2575; deposited with the ATCC on Jan. 5, 2001, and having depositor reference numbers TS-1, TS-2, AC-1, and AC-2; and/or as set forth, for example, in Table 1A, 6 and 7). The nucleotide sequence of each deposited clone can readily be determined by sequencing the deposited clone in accordance with known methods. Further, techniques known in the art can be used to verify the nucleotide sequences of SEQ ID NO:X.

[0056] The predicted amino acid sequence can then be verified from such deposits. Moreover, the amino acid sequence of the protein encoded by a particular clone can also be directly determined by peptide sequencing or by expressing the protein in a suitable host cell containing the deposited human cDNA, collecting the protein, and determining its sequence.

[0057] RACE Protocol For Recovery of Full-length Genes

[0058] Partial cDNA clones can be made full-length by utilizing the rapid amplification of cDNA ends (RACE) procedure described in Frohman, M. A., et al., Proc. Nat'l. Acad. Sci. USA, 85:8998-9002 (1988). A cDNA clone missing either the 5′ or 3′ end can be reconstructed to include the absent base pairs extending to the translational start or stop codon, respectively. In some cases, cDNAs are missing the start codon of translation, therefor. The following briefly describes a modification of this original 5′ RACE procedure. Poly A+ or total RNA is reverse transcribed with Superscript II (Gibco/BRL) and an antisense or complementary primer specific to the cDNA sequence. The primer is removed from the reaction with a Microcon Concentrator (Amicon). The first-strand cDNA is then tailed with dATP and terminal deoxynucleotide transferase (Gibco/BRL). Thus, an anchor sequence is produced which is needed for PCR amplification. The second strand is synthesized from the dA-tail in PCR buffer, Taq DNA polymerase (Perkin-Elmer Cetus), an oligo-dT primer containing three adjacent restriction sites (XhoI, SalI and ClaI) at the 5′ end and a primer containing just these restriction sites. This double-stranded cDNA is PCR amplified for 40 cycles with the same primers as well as a nested cDNA-specific antisense primer. The PCR products are size-separated on an ethidium bromide-agarose gel and the region of gel containing cDNA products the predicted size of missing protein-coding DNA is removed. cDNA is purified from the agarose with the Magic PCR Prep kit (Promega), restriction digested with XhoI or SalI, and ligated to a plasmid such as pBluescript SKII (Stratagene) at XhoI and EcoRV sites. This DNA is transformed into bacteria and the plasmid clones sequenced to identify the correct protein-coding inserts. Correct 5′ ends are confirmed by comparing this sequence with the putatively identified homologue and overlap with the partial cDNA clone. Similar methods known in the art and/or commercial kits are used to amplify and recover 3′ ends.

[0059] Several quality-controlled kits are commercially available for purchase. Similar reagents and methods to those above are supplied in kit form from Gibco/BRL for both 5′ and 3′ RACE for recovery of full length genes. A second kit is available from Clontech which is a modification of a related technique, SLIC (single-stranded ligation to single-stranded cDNA), developed by Dumas et al., Nucleic Acids Res., 19:5227-32 (1991). The major differences in procedure are that the RNA is alkaline hydrolyzed after reverse transcription and RNA ligase is used to join a restriction site-containing anchor primer to the first-strand cDNA. This obviates the necessity for the dA-tailing reaction which results in a polyT stretch that is difficult to sequence past.

[0060] An alternative to generating 5′ or 3′ cDNA from RNA is to use cDNA library double-stranded DNA. An asymmetric PCR-amplified antisense cDNA strand is synthesized with an antisense cDNA-specific primer and a plasmid-anchored primer. These primers are removed and a symmetric PCR reaction is performed with a nested cDNA-specific antisense primer and the plasmid-anchored primer.

[0061] RNA Ligase Protocol for Generating the 5′ or 3′ End Sequences to Obtain Full Length Genes

[0062] Once a gene of interest is identified, several methods are available for the identification of the 5′ or 3′ portions of the gene which may not be present in the original cDNA plasmid. These methods include, but are not limited to, filter probing, clone enrichment using specific probes and protocols similar and identical to 5′ and 3′ RACE. While the full length gene may be present in the library and can be identified by probing, a useful method for generating the 5′ or 3′ end is to use the existing sequence information from the original cDNA to generate the missing information. A method similar to 5′ RACE is available for generating the missing 5′ end of a desired full-length gene. (This method was published by Fromont-Racine et al., Nucleic Acids Res., 21(7):1683-1684 (1993)). Briefly, a specific RNA oligonucleotide is ligated to the 5′ ends of a population of RNA presumably containing full-length gene RNA transcript and a primer set containing a primer specific to the ligated RNA oligonucleotide and a primer specific to a known sequence of the gene of interest, is used to PCR amplify the 5′ portion of the desired full length gene which may then be sequenced and used to generate the full length gene. This method starts with total RNA isolated from the desired source, poly A RNA may be used but is not a prerequisite for this procedure. The RNA preparation may then be treated with phosphatase if necessary to eliminate 5′ phosphate groups on degraded or damaged RNA which may interfere with the later RNA ligase step. The phosphatase if used is then inactivated and the RNA is treated with tobacco acid pyrophosphatase in order to remove the cap structure present at the 5′ ends of messenger RNAs. This reaction leaves a 5′ phosphate group at the 5′ end of the cap cleaved RNA which can then be ligated to an RNA oligonucleotide using T4 RNA ligase. This modified RNA preparation can then be used as a template for first strand cDNA synthesis using a gene specific oligonucleotide. The first strand synthesis—reaction can then be used as a template for PCR amplification of the desired 5′ end using a primer specific to the ligated RNA oligonucleotide and a primer specific to the known sequence of the gene of interest. The resultant product is then sequenced and analyzed to confirm that the 5′ end sequence belongs to the relevant gene.

[0063] The present invention also relates to vectors or plasmids which include such DNA sequences, as well as the use of the DNA sequences. The material deposited with the ATCC (deposited with the ATCC on Oct. 5, 2000, and receiving ATCC designation numbers PTA 2574 and PTA 2575; deposited with the ATCC on Jan. 5, 2001, and receiving ATCC designation numbers TS-1, TS-2, AC-1, and AC-2; and/or as set forth, for example, in Table 1A, Table 6, or Table 7) is a mixture of cDNA clones derived from a variety of human tissue and cloned in either a plasmid vector or a phage vector, as described, for example, in Table 7. These deposits are referred to as “the deposits” herein. The tissues from which some of the clones were derived are listed in Table 7, and the vector in which the corresponding cDNA is contained is also indicated in Table 7. The deposited material includes cDNA clones corresponding to SEQ ID NO:X described, for example, in Table 1A (Clone ID NO:Z). A clone which is isolatable from the ATCC Deposits by use of a sequence listed as SEQ ID NO:X, may include the entire coding region of a human gene or in other cases such clone may include a substantial portion of the coding region of a human gene. Furthermore, although the sequence listing may in some instances list only a portion of the DNA sequence in a clone included in the ATCC Deposits, it is well within the ability of one skilled in the art to sequence the DNA included in a clone contained in the ATCC Deposits by use of a sequence (or portion thereof) described in, for example Tables 1A or 2 by procedures hereinafter further described, and others apparent to those skilled in the art.

[0064] Also provided in Table 7 is the name of the vector which contains the cDNA clone. Each vector is routinely used in the art. The following additional information is provided for convenience.

[0065] Vectors Lambda Zap (U.S. Pat. Nos. 5,128,256 and 5,286,636), Uni-Zap XR (U.S. Pat. Nos. 5,128, 256 and 5,286,636), Zap Express (U.S. Pat. Nos. 5,128,256 and 5,286,636), pBluescript (pBS) (Short, J. M. et al., Nucleic Acids Res. 16:7583-7600 (1988); Alting-Mees, M. A. and Short, J. M., Nucleic Acids Res. 17:9494 (1989)) and pBK (Alting-Mees, M. A. et al., Strategies 5:58-61 (1992)) are commercially available from Stratagene Cloning Systems, Inc., 11011 N. Torrey Pines Road, La Jolla, Calif., 92037. pBS contains an ampicillin resistance gene and pBK contains a neomycin resistance gene. Phagemid pBS may be excised from the Lambda Zap and Uni-Zap XR vectors, and phagemid pBK may be excised from the Zap Express vector. Both phagemids may be transformed into E. coli strain XL-1 Blue, also available from Stratagene.

[0066] Vectors pSport1, pCMVSport 1.0, pCMVSport 2.0 and pCMVSport 3.0, were obtained from Life Technologies, Inc., P. O. Box 6009, Gaithersburg, Md. 20897. All Sport vectors contain an ampicillin resistance gene and may be transformed into E. coli strain DH10B, also available from Life Technologies. See, for instance, Gruber, C. E., et al., Focus 15:59-(1993). Vector lafmid BA (Bento Soares, Columbia University, New York, N.Y.) contains an ampicillin resistance gene and can be transformed Into E. coli strain XL-1 Blue. Vector pCR®2. 1, which is available from Invitrogen, 1600 Faraday Avenue, Carlsbad, Calif. 92008, contains an ampicillin resistance gene and may be transformed into E. coli strain DH10B, available from Life Technologies. See, for instance, Clark, J. M., Nuc. Acids Res. 16:9677-9686 (1988) and Mead, D. et al., Bio/Technology 9: (1991).

[0067] The present invention also relates to the genes corresponding to SEQ ID NO:X, SEQ ID NO:Y, and/or the deposited clone (Clone ID NO:Z). The corresponding gene can be isolated in accordance with known methods using the sequence information disclosed herein. Such methods include preparing probes or primers from the disclosed sequence and identifying or amplifying the corresponding gene from appropriate sources of genomic material.

[0068] Also provided in the present invention are allelic variants, orthologs, and/or species homologs. Procedures known in the art can be used to obtain full-length genes, allelic variants, splice variants, full-length coding portions, orthologs, and/or species homologs of genes corresponding to SEQ ID NO:X or the complement thereof, polypeptides encoded by genes corresponding to SEQ ID NO:X or the complement thereof, and/or the cDNA contained in Clone ID NO:Z, using information from the sequences disclosed herein or the clones deposited with the ATCC. For example, allelic variants and/or species homologs may be isolated and identified by making suitable probes or primers from the sequences provided herein and screening a suitable nucleic acid source for allelic variants and/or the desired homologue.

[0069] The polypeptides of the invention can be prepared in any suitable manner. Such polypeptides include isolated naturally occurring polypeptides, recombinantly produced polypeptides, synthetically produced polypeptides, or polypeptides produced by a combination of these methods. Means for preparing such polypeptides are well understood in the art.

[0070] The polypeptides may be in the form of the secreted protein, including the mature form, or may be a part of a larger protein, such as a fusion protein (see below). It is often advantageous to include an additional amino acid sequence which contains secretory or leader sequences, pro-sequences, sequences which aid in purification, such as multiple histidine residues, or an additional sequence for stability during recombinant production.

[0071] The polypeptides of the present invention are preferably provided in an isolated form, and preferably are substantially purified. A recombinantly produced version of a polypeptide, including the secreted polypeptide, can be substantially purified using techniques described herein or otherwise known in the art, such as, for example, by the one-step method described in Smith and Johnson, Gene 67:31-40 (1988). Polypeptides of the invention also can be purified from natural, synthetic or recombinant sources using techniques described herein or otherwise known in the art, such as, for example, antibodies of the invention raised against the polypeptides of the present invention in methods which are well known in the art.

[0072] The present invention provides a polynucleotide comprising, or alternatively consisting of, the nucleic acid sequence of SEQ ID NO:X, and/or the cDNA sequence contained in Clone ID NO:Z. The present invention also provides a polypeptide comprising, or alternatively, consisting of, the polypeptide sequence of SEQ ID NO:Y, a polypeptide encoded by SEQ ID NO:X or a complement thereof, a polypeptide encoded by the cDNA contained in Clone ID NO:Z, and/or the polypeptide sequence encoded by a nucleotide sequence in SEQ ID NO:B as defined in column 6 of Table 1B. Polynucleotides encoding a polypeptide comprising, or alternatively consisting of the polypeptide sequence of SEQ ID NO:Y, a polypeptide encoded by SEQ ID NO:X, a polypeptide encoded by the cDNA contained in Clone ID NO:Z, and/or a polypeptide sequence encoded by a nucleotide sequence in SEQ ID NO:B as defined in column 6 of Table 1B are also encompassed by the invention. The present invention further encompasses a polynucleotide comprising, or alternatively consisting of, the complement of the nucleic acid sequence of SEQ ID NO:X, a nucleic acid sequence encoding a polypeptide encoded by the complement of the nucleic acid sequence of SEQ ID NO:X, and/or the cDNA contained in Clone ID NO:Z.

[0073] Moreover, representative examples of polynucleotides of the invention comprise, or alternatively consist of, one, two, three, four, five, six, seven, eight, nine, ten, or more of the sequences delineated in Table 1B column 6, or any combination thereof. Additional, representative examples of polynucleotides of the invention comprise, or alternatively consist of, one, two, three, four, five, six, seven, eight, nine, ten, or more of the complementary strand(s) of the sequences delineated in Table 1B column 6, or any combination thereof. In further embodiments, the above-described polynucleotides of the invention comprise, or alternatively consist of, sequences delineated in Table 1B, column 6, and have a nucleic acid sequence which is different from that of the BAC fragment having the sequence disclosed in SEQ ID NO:B (see Table 1B, column 5). In additional embodiments, the above-described polynucleotides of the invention comprise, or alternatively consist of, sequences delineated in Table 1B, column 6, and have a nucleic acid sequence which is different from that published for the BAC clone identified as BAC ID NO:A (see Table 1B, column 4). In additional embodiments, the above-described polynucleotides of the invention comprise, or alternatively consist of, sequences delineated in Table 1B, column 6, and have a nucleic acid sequence which is different from that contained in the BAC clone identified as BAC ID NO:A (see Table 1B, column 4). Polypeptides encoded by these polynucleotides, other polynucleotides that encode these polypeptides, and antibodies that bind these polypeptides are also encompassed by the invention. Additionally, fragments and variants of the above-described polynucleotides and polypeptides are also encompassed by the invention.

[0074] Further, representative examples of polynucleotides of the invention comprise, or alternatively consist of, one, two, three, four, five, six, seven, eight, nine, ten, or more of the sequences delineated in column 6 of Table 1B which correspond to the same Clone ID NO:Z (see Table 1B, column 1), or any combination thereof. Additional, representative examples of polynucleotides of the invention comprise, or alternatively consist of, one, two, three, four, five, six, seven, eight, nine, ten, or more of the complementary strand(s) of the sequences delineated in column 6 of Table 1B which correspond to the same Clone ID NO:Z (see Table 1B, column 1), or any combination thereof. In further embodiments, the above-described polynucleotides of the invention comprise, or alternatively consist of, sequences delineated in column 6 of Table 1B which correspond to the same Clone ID NO:Z (see Table 1B, column 1) and have a nucleic acid sequence which is different from that of the BAC fragment having the sequence disclosed in SEQ ID NO:B (see Table 1B, column 5). In additional embodiments, the above-described polynucleotides of the invention comprise, or alternatively consist of, sequences delineated in column 6 of Table 1B which correspond to the same Clone ID NO:Z (see Table 1B, column 1) and have a nucleic acid sequence which is different from that published for the BAC clone identified as BAC ID NO:A (see Table 1B, column 4). In additional embodiments, the above-described polynucleotides of the invention comprise, or alternatively consist of, sequences delineated in column 6 of Table 1B which correspond to the same Clone ID NO:Z (see Table 1B, column 1) and have a nucleic acid sequence which is different from that contained in the BAC clone identified as BAC ID NO:A (see Table 1B, column 4). Polypeptides encoded by these polynucleotides, other polynucleotides that encode these polypeptides, and antibodies that bind these polypeptides are also encompassed by the invention. Additionally, fragments and variants of the above-described polynucleotides and polypeptides are also encompassed by the invention.

[0075] Further, representative examples of polynucleotides of the invention comprise, or alternatively consist of, one, two, three, four, five, six, seven, eight, nine, ten, or more of the sequences delineated in column 6 of Table 1B which correspond to the same contig sequence identifer SEQ ID NO:X (see Table 1B, column 2), or any combination thereof. Additional, representative examples of polynucleotides of the invention comprise, or alternatively consist of, one, two, three, four, five, six, seven, eight, nine, ten, or more of the complementary strand(s) of the sequences delineated in column 6 of Table 1B which correspond to the same contig sequence identifer SEQ ID NO:X (see Table 1B, column 2), or any combination thereof. In further embodiments, the above-described polynucleotides of the invention comprise, or alternatively consist of, sequences delineated in column 6 of Table 1B which correspond to the same contig sequence identifer SEQ ID NO:X (see Table 1B, column 2) and have a nucleic acid sequence which is different from that of the BAC fragment having the sequence disclosed in SEQ ID NO:B (see Table 1B, column 5). In additional embodiments, the above-described polynucleotides of the invention comprise, or alternatively consist of, sequences delineated in column 6 of Table 1B which correspond to the same contig sequence identifer SEQ ID NO:X (see Table 1B, column 2) and have a nucleic acid sequence which is different from that published for the BAC clone identified as BAC ID NO:A (see Table 1B, column 4). In additional embodiments, the above-described polynucleotides of the invention comprise, or alternatively consist of, sequences delineated in column 6 of Table 1B which correspond to the same contig sequence identifer SEQ ID NO:X (see Table 1B, column 2) and have a nucleic acid sequence which is different from that contained in the BAC clone identified as BAC ID NO:A (See Table 1B, column 4). Polypeptides encoded by these polynucleotides, other polynucleotides that encode these polypeptides, and antibodies that bind these polypeptides are also encompassed by the invention. Additionally, fragments and variants of the above-described polynucleotides and polypeptides are also encompassed by the invention.

[0076] Moreover, representative examples of polynucleotides of the invention comprise, or alternatively consist of, one, two, three, four, five, six, seven, eight, nine, ten, or more of the sequences delineated in the same row of Table 1B column 6, or any combination thereof. Additional, representative examples of polynucleotides of the invention comprise, or alternatively consist of, one, two, three, four, five, six, seven, eight, nine, ten, or more of the complementary strand(s) of the sequences delineated in the same row of Table 1B column 6, or any combination thereof. In preferred embodiments, the polynucleotides of the invention comprise, or alternatively consist of, one, two, three, four, five, six, seven, eight, nine, ten, or more of the complementary strand(s) of the sequences delineated in the same row of Table 1B column 6, wherein sequentially delineated sequences in the table (i.e. corresponding to those exons located closest to each other) are directly contiguous in a 5′ to 3′ orientation. In further embodiments, above-described polynucleotides of the invention comprise, or alternatively consist of, sequences delineated in the same row of Table 1B, column 6, and have a nucleic acid sequence which is different from that of the BAC fragment having the sequence disclosed in SEQ ID NO:B (see Table 1B, column 5). In additional embodiments, the above-described polynucleotides of the invention comprise, or alternatively consist of, sequences delineated in the same row of Table 1B, column 6, and have a nucleic acid sequence which is different from that published for the BAC clone identified as BAC ID NO:A (see Table 1B, column 4). In additional embodiments, the above-described polynucleotides of the invention comprise, or alternatively consist of, sequences delineated in the same row of Table 1B, column 6, and have a nucleic acid sequence which is different from that contained in the BAC clone identified as BAC ID NO:A (see Table 1B, column 4). Polypeptides encoded by these polynucleotides, other polynucleotides that encode these polypeptides, and antibodies that bind these polypeptides are also encompassed by the invention.

[0077] In additional specific embodiments, polynucleotides of the invention comprise, or alternatively consist of, one, two, three, four, five, six, seven, eight, nine, ten, or more of the sequences delineated in column 6 of Table 1B, and the polynucleotide sequence of SEQ ID NO:X (e.g., as defined in Table 1B, column 2) or fragments or variants thereof. Polypeptides encoded by these polynucleotides, other polynucleotides that encode these polypeptides, and antibodies that bind these polypeptides are also encompassed by the invention.

[0078] In additional specific embodiments, polynucleotides of the invention comprise, or alternatively consist of, one, two, three, four, five, six, seven, eight, nine, ten, or more of the sequences delineated in column 6 of Table 1B which correspond to the same Clone ID NO:Z (see Table 1B, column 1), and the polynucleotide sequence of SEQ ID NO:X (e.g., as defined in Table 1A or 1B) or fragments or variants thereof. In preferred embodiments, the delineated sequence(s) and polynucleotide sequence of SEQ ID NO:X correspond to the same Clone ID NO:Z. Polypeptides encoded by these polynucleotides, other polynucleotides that encode these polypeptides, and antibodies that bind these polypeptides are also encompassed by the invention.

[0079] In further specific embodiments, polynucleotides of the invention comprise, or alternatively consist of, one, two, three, four, five, six, seven, eight, nine, ten, or more of the sequences delineated in the same row of column 6 of Table 1B, and the polynucleotide sequence of SEQ ID NO:X (e.g., as defined in Table 1A or 1B) or fragments or variants thereof. In preferred embodiments, the delineated sequence(s) and polynucleotide sequence of SEQ ID NO:X correspond to the same row of column 6 of Table 1B. Polypeptides encoded by these polynucleotides, other polynucleotides that encode these polypeptides, and antibodies that bind these polypeptides are also encompassed by the invention.

[0080] In additional specific embodiments, polynucleotides of the invention comprise, or alternatively consist of a polynucleotide sequence in which the 3′ 10 polynucleotides of one of the sequences delineated in column 6 of Table 1B and the 5′ 10 polynucleotides of the sequence of SEQ ID NO:X are directly contiguous. Nucleic acids which hybridize to the complement of these 20 contiguous polynucleotides under stringent hybridization conditions or alternatively, under lower stringency conditions, are also encompassed by the invention. Polypeptides encoded by these polynucleotides and/or nucleic acids, other polynucleotides and/or nucleic acids that encode these polypeptides, and antibodies that bind these polypeptides are also encompassed by the invention. Additionally, fragments and variants of the above-described polynucleotides, nucleic acids, and polypeptides are also encompassed by the invention.

[0081] In additional specific embodiments, polynucleotides of the invention comprise, or alternatively consist of, a polynucleotide sequence in which the 3′ 10 polynucleotides of one of the sequences delineated in column 6 of Table 1B and the 5′ 10 polynucleotides of a fragment or variant of the sequence of SEQ ID NO:X are directly contiguous Nucleic acids which hybridize to the complement of these 20 contiguous polynucleotides under stringent hybridization conditions or alternatively, under lower stringency conditions, are also encompassed by the invention. Polypeptides encoded by these polynucleotides and/or nucleic acids, other polynucleotides and/or nucleic acids encoding these polypeptides, and antibodies that bind these polypeptides are also encompassed by the invention. Additionally, fragments and variants of the above-described polynucleotides, nucleic acids, and polypeptides are also encompassed by the invention.

[0082] In specific embodiments, polynucleotides of the invention comprise, or alternatively consist of, a polynucleotide sequence in which the 3′ 10 polynucleotides of the sequence of SEQ ID NO:X and the 5′ 10 polynucleotides of the sequence of one of the sequences delineated in column 6 of Table 1B are directly contiguous. Nucleic acids which hybridize to the complement of these 20 contiguous polynucleotides under stringent hybridization conditions or alternatively, under lower stringency conditions, are also encompassed by the invention. Polypeptides encoded by these polynucleotides and/or nucleic acids, other polynucleotides and/or nucleic acids encoding these polypeptides, and antibodies that bind these polypeptides are also encompassed by the invention. Additionally, fragments and variants of the above-described polynucleotides, nucleic acids, and polypeptides are also encompassed by the invention.

[0083] In specific embodiments, polynucleotides of the invention comprise, or alternatively consist of, a polynucleotide sequence in which the 3′ 10 polynucleotides of a fragment or variant of the sequence of SEQ ID NO:X and the 5′ 10 polynucleotides of the sequence of one of the sequences delineated in column 6 of Table 1B are directly contiguous. Nucleic acids which hybridize to the complement of these 20 contiguous polynucleotides under stringent hybridization conditions or alternatively, under lower stringency conditions, are also encompassed by the invention. Polypeptides encoded by these polynucleotides and/or nucleic acids, other polynucleotides and/or nucleic acids encoding these polypeptides, and antibodies that bind these polypeptides are also encompassed by the invention. Additionally, fragments and variants of the above-described polynucleotides, nucleic acids, and polypeptides, are also encompassed by the invention.

[0084] In further specific embodiments, polynucleotides of the invention comprise, or alternatively consist of, a polynucleotide sequence in which the 3′ 10 polynucleotides of one of the sequences delineated in column 6 of Table 1B and the 5′ 10 polynucleotides of another sequence in column 6 are directly contiguous. Nucleic acids which hybridize to the complement of these 20 contiguous polynucleotides under stringent hybridization conditions or alternatively, under lower stringency conditions, are also encompassed by the invention. Polypeptides encoded by these polynucleotides and/or nucleic acids, other polynucleotides and/or nucleic acids encoding these polypeptides, and antibodies that bind these polypeptides are also encompassed by the invention. Additionally, fragments and variants of the above-described polynucleotides, nucleic acids, and polypeptides are also encompassed by the invention.

[0085] In specific embodiments, polynucleotides of the invention comprise, or alternatively consist of, a polynucleotide sequence in which the 3′ 10 polynucleotides of one of the sequences delineated in column 6 of Table 1B and the 5′ 10 polynucleotides of another sequence in column 6 corresponding to the same Clone ID NO:Z (see Table 1B, column 1) are directly contiguous. Nucleic acids which hybridize to the complement of these 20 lower stringency conditions, are also encompassed by the invention. Polypeptides encoded by these polynucleotides and/or nucleic acids, other polynucleotides and/or nucleic acids encoding these polypeptides, and antibodies that bind these polypeptides are also encompassed by the invention. Additionally, fragments and variants of the above-described polynucleotides, nucleic acids, and polypeptides are also encompassed by the invention.

[0086] In specific embodiments, polynucleotides of the invention comprise, or alternatively consist of, a polynucleotide sequence in which the 3′ 10 polynucleotides of one sequence in column 6 corresponding to the same contig sequence identifer SEQ ID NO:X (see Table 1B, column 2) are directly contiguous. Nucleic acids which hybridize to the complement of these 20 contiguous polynucleotides under stringent hybridization conditions or alternatively, under lower stringency conditions, are also encompassed by the invention. Polypeptides encoded by these polynucleotides and/or nucleic acids, other polynucleotides and/or nucleic acids encoding these polypeptides, and antibodies that bind these polypeptides are also encompassed by the invention. Additionally, fragments and variants of the above-described polynucleotides, nucleic acids, and polypeptides are also encompassed by the invention.

[0087] In specific embodiments, polynucleotides of the invention comprise, or alternatively consist of a polynucleotide sequence in which the 3′ 10 polynucleotides of one of the sequences delineated in column 6 of Table 1B and the 5′ 10 polynucleotides of another sequence in column 6 corresponding to the same row are directly contiguous. In preferred embodiments, the 3′ 10 polynucleotides of one of the sequences delineated in column 6 of Table 1B is directly contiguous with the 5′ 10 polynucleotides of the next sequential exon delineated in Table 1B, column 6. Nucleic acids which hybridize to the complement of these 20 contiguous polynucleotides under stringent hybridization conditions or alternatively, under lower stringency conditions, are also encompassed by the invention. Polypeptides encoded by these polynucleotides and/or nucleic acids, other polynucleotides and/or nucleic acids encoding these polypeptides, and antibodies that bind these polypeptides are also encompassed by the invention. Additionally, fragments and variants of the above-described polynucleotides, nucleic acids, and polypeptides are also encompassed by the invention.

[0088] Many polynucleotide sequences, such as EST sequences, are publicly available and accessible through sequence databases and may have been publicly available prior to conception of the present invention. Preferably, such related polynucleotides are specifically excluded from the scope of the present invention. Accordingly, for each contig sequence (SEQ ID NO:X) listed in the fourth column of Table 1A, preferably excluded are one or more polynucleotides comprising a nucleotide sequence described by the general formula of a-b, where a is any integer between 1 and the final nucleotide minus 15 of SEQ ID NO:X, b is an integer of 15 to the final nucleotide of SEQ ID NO:X, where both a and b correspond to the positions of nucleotide residues shown in SEQ ID NO:X, and where b is greater than or equal to a +14. More specifically, preferably excluded are one or more polynucleotides comprising a nucleotide sequence described by the general formula of a−b, where a and b are integers as defined in columns 4 and 5, respectively, of Table 3. In specific embodiments, the polynucleotides of the invention do not consist of at least one, two, three, four, five, ten, or more of the specific polynucleotide sequences referenced by the Genbank Accession No. as disclosed in column 6 of Table 3 (including for example, published sequence in connection with a particular BAC clone). In further embodiments, preferably excluded from the invention are the specific polynucleotide sequence(s) contained in the clones corresponding to at least one, two, three, four, five, ten, or more of the available material having the accession numbers identified in the sixth column of this Table (including for example, the actual sequence contained in an identified BAC clone). In no way is this listing meant to encompass all of the sequences which may be excluded by the general formula, it is just a representative example. All references available through these accessions are hereby incorporated by reference in their entirely.

TABLE 3

| Clone ID | SEQ ID | Contig | EST Disclaimer | | |
|---|---|---|---|---|---|
| NO: Z | NO: X | ID: | Range of a | Range of b | Accession #'s |
| HNHAM52 | 11 | 1128030 | 1-747 | 15-761 | AI580306, AA211410, N40468, N48507, |
| | | | | | AL080135, and AC004810. |
| HMMAB49 | 12 | 1126302 | 1-661 | 15-675 | D29160, AW151102, AW406755, AA584489, |
| | | | | | AL046409, AI963720, AI284640, AA635433, |
| | | | | | AI358229, AI431303, AW023672, AI620585, |
| | | | | | AL042756, AA613627, AI365988, |
| | | | | | AW270258, AW193265, AI732151, |
| | | | | | AW270619, AI613459, AW029038, |
| | | | | | AI732690, AI783911, AI368745, AI733856, |
| | | | | | AI345681, AI345675, AW340905, AI570943, |
| | | | | | AI267356, AI865905, AW276827, H23439, |
| | | | | | AI345566, F29989, AA779783, AI281881, |
| | | | | | AI090334, AI753365, AA524800, AW157005, |
| | | | | | AI192631, C05694, AI885572, AA262752, |
| | | | | | AW272794, AI350211, AI267450, AI561060, |
| | | | | | AL038936, AI609984, AA176605, AI613280, |
| | | | | | AI028510, AA657835, F36273, AW167154, |
| | | | | | T05834, AI636627, AI291823, AW088202, |
| | | | | | AL048925, AA527209, AI336054, |
| | | | | | AW028376, AI598003, AA469451, |
| | | | | | AA720582, AW419262, AA955031, |
| | | | | | AI345157, AI003068, C75026, AI039809, |
| | | | | | AI345695, AI889440, AI338426, AI610012, |
| | | | | | AA177061, AI254913, AA992126, AI338808, |
| | | | | | AI206392, AI355586, AI610256, AI270476, |
| | | | | | AA598545, AW088616, AA665330, |
| | | | | | AI493264, AI628224, AL119438, AA665449, |
| | | | | | AI291268, AI291124, AI355587, AI312790, |
| | | | | | AI863399, AI935827, AI049701, AC007425, |
| | | | | | D87675, AL121655, AC004895, AF134726, |
| | | | | | AF002992, AC006241, AC000353, D83989, |
| | | | | | AC006285, I51997, U18399, AF015167, |
| | | | | | U57009, A39972, AF015147, U18391, |
| | | | | | U18394, U57007, AC005102, AC004859, |
| | | | | | AF015158, AL096701, U02532, Z86090, |
| | | | | | AC006373, X54175, AC004797, AC003104, |
| | | | | | Z69591, U63630, AJ011930, U18387, |
| | | | | | AC006953, AL035420, AC004655, AF015148, |
| | | | | | AP000697, Z82176, U18393, U57005, |
| | | | | | X54181, X55925, AP000696, AL049636, |
| | | | | | AF015160, X54176, X53550, AC007395, |
| | | | | | AC002301, X54180, AF077058, AC003046, |
| | | | | | AC006942, Z84467, AL022238, U18392, |
| | | | | | AL031589, AC007899, U85195, X55931, |
| | | | | | AC005261, AC007999, Z97053, L78810, |
| | | | | | AC005568, AC004816, AF107885, U57008, |
| | | | | | AL021940, AC005740, S75201, AL035079, |
| | | | | | AC004685, AE000658, AL049699, AP000557, |
| | | | | | U57006, AC006539, AC005257, AC004596, |
| | | | | | AC002350, AC005722, U67221, AF207550, |
| | | | | | AC004963, AP000135, AC005081, X74558, |
| | | | | | AC005996, AC005480, AC007773, |
| | | | | | AP000088, AF064861, AP000272, AL035423, |
| | | | | | AP000962, AC003109, X54178, AP001037, |
| | | | | | Z83844, AL049569, D84394, Z85995, |
| | | | | | AC004754, AC007011, AC005015, |
| | | | | | AL049776, AC005512, AC004755, AF031078, |
| | | | | | AP000031, AL121603, AP000048, AF015166, |
| | | | | | Z98748, AP000300, AL035659, U67817, |
| | | | | | AC006080, AC006207, AC006312, |
| | | | | | AC004983, AC005370, AL049874, AF015162, |
| | | | | | AF030876, AC004854, AC020663, AL050318, |
| | | | | | AL034549, AC005736, AC004502, |
| | | | | | AC005399, AC004659, AC007397, |
| | | | | | AL021155, AF190465, AC004019, AL122023, |
| | | | | | AL022302, AL096862, AL132992, AC004485, |
| | | | | | AC007043, AL033543, AC005288, |
| | | | | | AL109759, AC005668, AP000194, AC004821, |
| | | | | | AP000008, AC005209, AP000704, AC005527, |
| | | | | | AP000115, AP000113, AP000045, AL078477, |
| | | | | | AC004382, AC005599, AC007227, |
| | | | | | AP000104, AC007200, AP000513, AC002073, |
| | | | | | AL021546, AC004033, Z84480, AL096767, |
| | | | | | AC000052, AC002316, AL135744, |
| | | | | | AC005755, AP000348, AL049830, AC005488, |
| | | | | | AL008735, AL035450, AC002480, AF015149, |
| | | | | | Z70289, AL031390, Z93244, AC005007, |
| | | | | | Z82208, AC007284, AC005764, AC004491, |
| | | | | | AC004408, AC005476, Z99716, AC007283, |
| | | | | | AP000556, AC005757, AL117352, AP000552, |
| | | | | | AL021154, AL035458, AC005076, |
| | | | | | AC005011, AC009516, AC000097, |
| | | | | | AC007731, Z82900, AL132987, Z69705, |
| | | | | | AC005562, AC007308, AC004531, |
| | | | | | AC005808, AC006077, AC004838, |
| | | | | | AL080243, AL050312, AP000280, U80017, |
| | | | | | AP000213, AL022163, AC005412, U18390, |
| | | | | | AC004129, AP000567, AC005367, AF015155, |
| | | | | | AL117344, Z73361, AC005759, AC005037, |
| | | | | | AC002457, AC004973, AL031720, AP000961, |
| | | | | | AC002470, and AC006064. |
| HRDBT72 | 13 | 1127562 | 1-865 | 15-879 | AW271904, AI696962, AL138455, |
| | | | | | AA680243, AW088846, AL369580, |
| | | | | | AL042756, AW237905, AA651639, |
| | | | | | AA610491, AI867058, AI358712, AI732120, |
| | | | | | AI431303, AW151105, AI754253, AI334443, |
| | | | | | AA634786, AA469327, AW069769, |
| | | | | | AW069227, AL046409, AW302315, |
| | | | | | AL119691, AL040054, AI963720, AI755214, |
| | | | | | AI753113, AI345157, AI368745, AW410354, |
| | | | | | AI061313, AA574442, AI754105, AI110844, |
| | | | | | AI358384, AI754567, AA521399, AA521323, |
| | | | | | AW327624, AA904275, AI887235, |
| | | | | | AL037683, AW021583, AL038842, |
| | | | | | AW103406, AW275971, AI821931, |
| | | | | | AA581903, AA644090, AW303196, |
| | | | | | AI054333, H05940, AI754336, AW301554, |
| | | | | | AW301350, AA128592, AW028429, |
| | | | | | AL042853, AI791150, AI821714, AI792133, |
| | | | | | AI791913, AI732151, AW084445, AI801482, |
| | | | | | AW193265, AI244127, AI679782, AI267818, |
| | | | | | AI305766, AI633025, AI350069, AW103758, |
| | | | | | AW340905, AW166611, AW327868, |
| | | | | | AA720702, AA610509, AW020088, |
| | | | | | AI754037, AI017251, AL042753, AI272052, |
| | | | | | AW189068, AL038606, AI821785, AI133164, |
| | | | | | AI311226, AI521525, AI457397, AI753365, |
| | | | | | AW274349, AI610920, AW302048, |
| | | | | | AA584484, AA714011, AA630362, |
| | | | | | AL120343, AI732671, AI821494, AI613280, |
| | | | | | AI133102, AI821467, AI094787, AI281881, |
| | | | | | AA833875, AA833896, AA167055, AI633168, |
| | | | | | AW068596, AI254913, AW131457, |
| | | | | | AI133029, AL118991, U73023, AL049869, |
| | | | | | AF146191, AC005666, AC004520, |
| | | | | | AC005019, Z75888, AC005184, AC004477, |
| | | | | | AC006077, AC004019, Z75887, Z84489, |
| | | | | | AL022323, AC004257, AP001053, AL049699, |
| | | | | | AC003663, AC004878, AL049713, |
| | | | | | AC005057, AC005015, AL021154, |
| | | | | | AL050307, AL109798, AC005224, |
| | | | | | AC011311, AF134726, AC004858, AL121603, |
| | | | | | AC005829, U80017, AL096791, AL008631, |
| | | | | | AC005225, AC005412, AC007677, U85195, |
| | | | | | AF109907, AC004139, AE000658, AC004685, |
| | | | | | Z97653, AC005921, AC006111, AC002073, |
| | | | | | AP000502, AC004087, AC002476, Z85987, |
| | | | | | AC004999, AC005013, AC005939, |
| | | | | | AL031767, AC002369, AL021579, |
| | | | | | AC004002, AL133448, U62293, U95739, |
| | | | | | AP000493, AC005772, AL031447, AL031003, |
| | | | | | AL031670, AC009044, AC005874, AF134471, |
| | | | | | AF050154, AC002119, AF196779, AF165142, |
| | | | | | AF091512, AC015853, AF117829, AL022328, |
| | | | | | AC006299, AL049780, AC004655, |
| | | | | | AC005562, AC007298, AB023049, Z85986, |
| | | | | | AC004797, AC005031, AL035461, |
| | | | | | AC005089, D83989, AC006509, AL121658, |
| | | | | | AL049552, U02532, AC004066, AC005295, |
| | | | | | AP000065, AC002558, AL133245, AC004893, |
| | | | | | AC007842, AC002086, AC006001, |
| | | | | | AL050318, AC004150, AC004003, |
| | | | | | AC002314, AC007225, U89335, Z93244, |
| | | | | | AL021393, AC004909, AL121595, |
| | | | | | AC005164, AC006121, AC005726, |
| | | | | | AC005066, AC006449, AP000356, |
| | | | | | AC004765, AL035420, Z69714, AC005919, |
| | | | | | AC009509, U78027, AP000114, AC004882, |
| | | | | | AC003006, AC004673, AL022476, |
| | | | | | AL034417, AC006088, AC006314, |
| | | | | | AC004656, AL034429, AC005060, |
| | | | | | AL035455, AL035422, AL049646, M30688, |
| | | | | | AC007685, AC005625, AL031659, |
| | | | | | AC006530, AC005943, AC006372, |
| | | | | | AC005050, AC005696, U91326, AC008115, |
| | | | | | AC007030, AC005620, AL049829, |
| | | | | | AC004905, AP000511, AL049759, AC007052, |
| | | | | | AB023048, Z82202, AC006262, AC006388, |
| | | | | | AC005663, AL096776, AF042090, AL034406, |
| | | | | | AC005330, AP000552, AP000501, AC004913, |
| | | | | | AC004859, AC006511, AC005365, Z84469, |
| | | | | | AL133246, AP000008, L44140, AC007055, |
| | | | | | AL049757, AC002559, Z97181, U95740, |
| | | | | | A0002301, AC007461, AC006011, |
| | | | | | AL121652, AL031685, AC007637, |
| | | | | | AC007207, AL021808, AC005081, |
| | | | | | AL096701, AC006571, AC005074, AF107257, |
| | | | | | AC004470, AC006285, AC006443, |
| | | | | | AL096702, AC004815, AC005215, |
| | | | | | AC002531, AC004752, U02531, AL032821, |
| | | | | | AC006115, AC008394, AC016025, |
| | | | | | AP000030, AC005377, AC002542, AL121653, |
| | | | | | AC005049, AC005254, AL109627, |
| | | | | | AL031654, AC004522, AC002470, |
| | | | | | AL022313, AC007057, AC005256, |
| | | | | | AL096712, X54486, AL022329, AC005210, |
| | | | | | Z99495, AL024507, AL009181, AL021391, |
| | | | | | AL031230, AC008009, AC005088, |
| | | | | | AC004686, AC006323, AC007688, |
| | | | | | AD000092, AL109952, AL035587, |
| | | | | | AC003043, AL132987, AC005746, |
| | | | | | AC004941, AC009501, AC005606, |
| | | | | | AC004263, AC006946, AP000518, AL035697, |
| | | | | | AC003108, AC000025, AC004972, |
| | | | | | AC007283, and AC006071. |
| HE2FR50 | 14 | 1127466 | 1-662 | 15-676 | AI961240, AA827821, AI718802, AI572903, |
| | | | | | AI379116, AI808413, AW262991, AI141317, |
| | | | | | AA446001, AA419448, AW338468, N66499, |
| | | | | | AA954259, AW151742, AA279131, |
| | | | | | AW268151, AA421293, AI417463, |
| | | | | | AA329700, AA832485, AI088138, AA705264, |
| | | | | | AA150283, R28937, AA421397, AA147276, |
| | | | | | AA150385, and AF129534. |
| HLHDR39 | 15 | 1124659 | 1-488 | 15-502 | |
| HSIDS82 | 16 | 1178550 | 1-735 | 15-749 | AW296375, and AA347128. |
| HSICX21 | 17 | 1227079 | 1-923 | 15-937 | AA583390, AC004551, AL031650, |
| | | | | | AC005622, AC002527, AL049779, and |
| | | | | | AC005531. |
| HCDAJI5 | 18 | 1136116 | 1-828 | 15-842 | AI619583, AA771958, AL038713, AI610326, |
| | | | | | AW102963, AW268051, AI382347, |
| | | | | | AI349829, AW268787, W36297, AI254827, |
| | | | | | AI598077, AI570164, AI249995, AI193408, |
| | | | | | AI220812, AI076479, R84318, AI685116, |
| | | | | | AI865581, AI378966, AA299156, AI186380, |
| | | | | | AI813836, AA344409, AA826143, AA890652, |
| | | | | | AI003789, AI376849, T50788, AI591332, |
| | | | | | AI457143, AI310239, AI926394, AI866116, |
| | | | | | AI336584, AW301368, AI345632, AI033935, |
| | | | | | AI251249, AI054162, AI340720, AI282577, |
| | | | | | F33837, AI793142, AI377100, AI921626, |
| | | | | | AA852059, F17026, AL040818, AI928570, |
| | | | | | AI345549, AW339583, AA468571, |
| | | | | | AW139132, T06365, AI375417, AI088245, |
| | | | | | AI540098, AI872191, AI369914, AI862212, |
| | | | | | AI805962, AI309322, AA446110, AA548061, |
| | | | | | AI053905, AI252097, AW148973, AI887321, |
| | | | | | H89662, AI678745, AI285660, AA551109, |
| | | | | | AA203291, AW085676, AI621138, AI051940, |
| | | | | | AI333568, AA748658, C17730, AI933550, |
| | | | | | N26697, AI191894, Z36956, AI971014, |
| | | | | | AA962220, AW243708, AI611997, F17041, |
| | | | | | AI783731, AI588913, AA852074, AI356342, |
| | | | | | W31733, AI356348, AI453790, AI051341, |
| | | | | | AL040846, AI758697, AA069204, AA620331, |
| | | | | | AI619818, AI890953, AW272376, AA847621, |
| | | | | | AL043725, AA359513, AI803354, AA223246, |
| | | | | | AA877295, AI147839, AI242057, AI032071, |
| | | | | | AA779937, AA570297, H01156, AI810990, |
| | | | | | R96586, AI564253, AI439415, R84298, |
| | | | | | AI282349, AA132716, AW084901, |
| | | | | | AA907819, T78394, AI813517, AA904946, |
| | | | | | AA601392, AW168798, AI818750, AI818764, |
| | | | | | AI683220, AI362498, AI028382, AA328438, |
| | | | | | AA972363, AA459350, AI382215, |
| | | | | | AW090395, AI244642, AI628308, AA565837, |
| | | | | | AA082049, AL133942, AI925647, AI246569, |
| | | | | | AI610776, AI421079, AA326171, AL036183, |
| | | | | | AI468037, AI354287, AI140677, AA635571, |
| | | | | | AL118834, W37263, AI933966, AI538654, |
| | | | | | R75627, AW193992, AA635562, AA584498, |
| | | | | | AI367384, AI264673, AI027714, AA368610, |
| | | | | | AI858607, H71710, N66283, AA467904, |
| | | | | | AA467957, AI652064, AI869945, AW275729, |
| | | | | | AA767353, N74502, AI696940, AA679855, |
| | | | | | AI734095, N53830, F18230, AI749571, |
| | | | | | W56878, AI197934, AA347740, AA811111, |
| | | | | | AA130476, AW157413, AA223830, |
| | | | | | AI479035, AI364461, AA058988, AI540401, |
| | | | | | AW167452, F16584, AI948934, H71074, |
| | | | | | AA613244, AA128992, AL109847, |
| | | | | | AC005053, AL023875, AC002480, |
| | | | | | AC005858, AL049545, AC005040, |
| | | | | | AC005593, AC004081, AP000966, |
| | | | | | AC000048, AL031286, AC006926, |
| | | | | | AC006063, AL031407, AC004664, |
| | | | | | AL035610, AC007032, AC005881, |
| | | | | | AC007228, AL035688, AC006973, |
| | | | | | AC005899, AC004869, AB020874, |
| | | | | | AC006054, AL121578, AL031176, Z78022, |
| | | | | | AC004519, AF049895, AC004551, AP000961, |
| | | | | | AC004066, AL121577, AF188024, AC004992, |
| | | | | | Z82195, AC005181, AC005336, AC002536, |
| | | | | | Z84816, AC003991, AC005553, AC004073, |
| | | | | | AC004931, AC005196, AF123462, |
| | | | | | AC004891, AC005913, AL034408, Z92844, |
| | | | | | AC005681, AC008109, AL080312, AF003529, |
| | | | | | AC006948, AL117337, AC007514, AF205588, |
| | | | | | Z99569, AC002288, AL121580, AC007198, |
| | | | | | AC007968, AC004741, AL079305, |
| | | | | | AL021940, AC004052, AF044083, U95738, |
| | | | | | Z95400, AL049858, AC007501, AC000114, |
| | | | | | AL021921, AL009173, AC009514, AL109618, |
| | | | | | AC007385, AC003661, AC006239, |
| | | | | | AL022577, AL049734, AL078623, AC004388, |
| | | | | | AL133500, AC010349, AC005145, |
| | | | | | AC007262, AC010722, AC004875, U91319, |
| | | | | | AL035633, AL022718, AL033525, AC007425, |
| | | | | | AP000071, AL022719, AL109758, Z86061, |
| | | | | | AC002065, AC006461, AC006502, |
| | | | | | AC005534, AF117829, AL031671, AC005537, |
| | | | | | AC004216, AC008124, AL031653, |
| | | | | | AL022099, AC004784, Z68326, AL035563, |
| | | | | | AC008498, AJ006345, ALI21767, AL024507, |
| | | | | | AL008633, Z68871, AC004911, AC006016, |
| | | | | | AC004562, AC003693, AC005090, |
| | | | | | AL096866, AC006257, AC007435, |
| | | | | | AL022164, AL023806, AC006455, |
| | | | | | AC006346, AJ229042, AF051934, AC004768, |
| | | | | | AC007284, AC006454, AF008243, AL049867, |
| | | | | | AC004887, AL049823, AF093117, AC004744, |
| | | | | | AC009069, AC010183, Z76735, AC008174, |
| | | | | | Z98255, AL078643, AC006023, Z95889, |
| | | | | | AC007376, AL031000, AL080239, |
| | | | | | AC006987, Z83827, AL096709, AC007630, |
| | | | | | AC003106, AF017257, AL034377, AC007786, |
| | | | | | AP000473, AC011594, AL022151, AL008987, |
| | | | | | AC006353, AC010209, AC009239, |
| | | | | | AC005752, AC005146, AC007012, |
| | | | | | AF130343, AL022724, Z84470, AC006381, |
| | | | | | Z95325, AC006456, AL133321, AC004385, |
| | | | | | AC007370, AC004384, AC003977, |
| | | | | | AC009405, AC005031, AP000475, |
| | | | | | AC004215, AE000660, Z98304, AC004184, |
| | | | | | AC006143, AL136297, AL034406, AP000160, |
| | | | | | AL117375, AL078639, AC008014, Z98051, |
| | | | | | AC006924, AL031673, AC009225, |
| | | | | | AL035555, AC002086, AF165175, U80017, |
| | | | | | AL080272, AP000018, Z93928, AC002523, |
| | | | | | AC005319, AL049642, AC005273, |
| | | | | | AC008275, Z95328, AL021026, AL009175, |
| | | | | | AC006572, AC006383, AC009241, |
| | | | | | AL021330, AC005187, AC004061, |
| | | | | | AB019440, AL031665, AP000157, AC009721, |
| | | | | | AC004225, AC006313, AC005227, |
| | | | | | AC006195, AC005284, AL022720, |
| | | | | | AC002529, AL079303, AE000659, |
| | | | | | AC006989, AL109621, AC005023, |
| | | | | | AC005017, AL035409, and AC004010. |
| HSNAH21 | 19 | 1200487 | 1-170 | 15-184 | AI074638, AAI56897, AA405746, AI288884, |
| | | | | | AI142828, AI434997, AA464691, AI079347, |
| | | | | | AI141600, AA558999, AI417262, AA524307, |
| | | | | | AA729535, AA492487, AW453078, |
| | | | | | AA436613, AA923317, AA746965, AI142582, |
| | | | | | AA424901, AA156817, AI339241, AI042516, |
| | | | | | AI097311, AI924831, AI435356, AI743842, |
| | | | | | AW023128, AA424767, AI751251, and |
| | | | | | AC004616. |
| HBZSH19 | 20 | 1219963 | 1-454 | 15-468 | AI707851, AI752914, AI610625, AI269269, |
| | | | | | H16800, AA223243, AI192616, AA720665, |
| | | | | | AW104357, H48475, AA576582, AW009078, |
| | | | | | and AA037054. |
| HWBCQ57 | 21 | 1128604 | 1-981 | 15-995 | AW404796, AA419168, AW405212, |
| | | | | | AW405771, AA858023, AW402670, |
| | | | | | AA482466, AW131668, AW406412, |
| | | | | | AW402410, AW406310, AI905912, |
| | | | | | AW406867, W87573, AI523647, AW406295, |
| | | | | | AI627929, W01611, AW406262, AI817360, |
| | | | | | AA634860, AW406388, AA165543, |
| | | | | | AW368560, AA131654, AW403503, |
| | | | | | AI889774, AA635838, AW170583, |
| | | | | | AW403480, AI913770, W87428, AA165510, |
| | | | | | AW403818, AA417879, W37301, AI433246, |
| | | | | | R62321, AA564957, AA746256, AA652656, |
| | | | | | AI554248, AI141914, AI097155, AI000769, |
| | | | | | AA703160, AI084034, AI149461, AI803471, |
| | | | | | AI469262, AI274173, AW404237, AA622265, |
| | | | | | H92391, AI193402, AA708855, AW072121, |
| | | | | | AI358266, T63635, AA360864, AA348102, |
| | | | | | H83811, AI831123, AI865230, AI250702, |
| | | | | | AW337397, R62322, AA159668, AI025871, |
| | | | | | AW403090, AA131588, AA679851, |
| | | | | | AA978343, H92332, AI719939, AI141141, |
| | | | | | T63837, AI336045, AA908772, N71267, |
| | | | | | AA367085, AI214586, AI758717, AA159773, |
| | | | | | AA405114, AI347065, AA381553, AI193894, |
| | | | | | AI709196, AA887979, AA918569, N40858, |
| | | | | | AI633727, AW407118, W01461, AA775022, |
| | | | | | AI347068, AW405872, T66015, AA878538, |
| | | | | | AA318565, AI701743, AI868933, AA862420, |
| | | | | | T65859, AW406039, AA173991, AI819482, |
| | | | | | AA385676, AI573045, AI281412, AW007639, |
| | | | | | AW016654, H25099, W37302, AW404245, |
| | | | | | AA411017, T63945, AW371963, AW392485, |
| | | | | | AA995292, AA362205, AI344688, T29163, |
| | | | | | AI375185, AW388120, AW388107, |
| | | | | | AW375541, AW388113, AA954002, |
| | | | | | AI078594, AA346471, AW377763, T28717, |
| | | | | | AW375539, T72429, AA603100, AW388115, |
| | | | | | AW405063, AI200165, AA922753, X00452, |
| | | | | | M34996, M20431, M33906, M26041, X00370, |
| | | | | | U92032, Z84490, Z84489, M20506, M17236, |
| | | | | | M29616, M29615, M17237, X00033, U77589, |
| | | | | | M93430, U42407, M17847, M11124, L34085, |
| | | | | | D50045, L33909, L34084, L34083, M29939, |
| | | | | | M17846, M16995, S40624, L34082, L42625, |
| | | | | | L34086, M93431, J00199, M29938, |
| | | | | | AF037314, L34094, L34090, L34088, L34089, |
| | | | | | L34087, L34352, L34091, L34092, L34093, |
| | | | | | D50048, D50047, D50049, M15557, |
| | | | | | AF012768, M74910, M74908, M74909, |
| | | | | | M74907, Y07942, Y07944, Z26591, Y07943, |
| | | | | | K01923, D50046, AR033964, AR033963, |
| | | | | | AF129124, AR033962, AF129118, AF129117, |
| | | | | | AF129120, AE129121, S81351, X00455, |
| | | | | | U91907, M59802, M95170, M34999, |
| | | | | | AF109734, L12916, U47858, L12915, L12914, |
| | | | | | L12917, S69985, E01702, 140296, AF126253, |
| | | | | | M18935, AF038155, M76189, U85035, |
| | | | | | AJ130870, U44785, U44787, L12922, |
| | | | | | AF031277, U03580, U03594, U03581, |
| | | | | | U44789, U44842, U75455, L12921, U47857, |
| | | | | | U03584, U03582, U44786, U44790, M95728, |
| | | | | | Y09968, U44788, U61400, X71613, M34997, |
| | | | | | X71614, L12918, M76218, L12920, M76228, |
| | | | | | M76201, AF091334, AF110840, M76187, |
| | | | | | AF110836, U97555, M76200, X71615, |
| | | | | | M76199, D88582, D88647, D88550, |
| | | | | | AF110843, U03675, M76212, D88580, |
| | | | | | M76195, AF110835, M76223, and AF091332. |
| HCFAT05 | 22 | 592118 | 1-478 | 15-492 | U96110, L23499, M38217, M85217, M55515, |
| | | | | | U38240, U38182, AR050270, and U45979. |
| HMWIN49 | 23 | 1195465 | 1-482 | 15-496 | AI037856, AA542997, AI311400, AI566802, |
| | | | | | AA310786, AA532689, AA398908, |
| | | | | | AA316357, AI311528, AI422657, AI589506, |
| | | | | | AA352183, W68226, AA320005, W68225, |
| | | | | | AI720450, AA935679, AA689231, AA176451, |
| | | | | | AI474407, AI073958, AI208100, AA541796, |
| | | | | | AA363414, AA985268, AW163567, |
| | | | | | AL038843, AW051112, AI300842, |
| | | | | | AW381682, AA161338, AA922650, |
| | | | | | AA176457, AA374424, AA094843, N87306, |
| | | | | | AW405970, AA425597, AA689508, |
| | | | | | AI267756, AW341775, AA092969, |
| | | | | | AA320778, AA745933, N28607, AA247451, |
| | | | | | AA876344, W32907, AA652657, AA627101, |
| | | | | | AW137988, N47392, AI989393, AA863326, |
| | | | | | N89372, AA933653, Z20829, AA402513, and |
| | | | | | A75039. |
| HOECV83 | 24 | 1126321 | 1-387 | 15-401 | AI140321, AI270499, AI810183, AA814586, |
| | | | | | AI910862, AI753510, AI199086, AI862658, |
| | | | | | AI367789, N51917, T16520, AA969919, |
| | | | | | F03901, W07603, N56197, and AL050087. |
| HWACV74 | 25 | 1165263 | 1-1745 | 15-1759 | AI762815, AI637581, AI702097, AW025622, |
| | | | | | AA814968, AI004348, AW193426, AI635627, |
| | | | | | AW081066, AI569925, AI933804, |
| | | | | | AW276794, AI864500, AA483606, |
| | | | | | AA570740, AA568204, F09355, AW019964, |
| | | | | | AC007011, AC007637, AP000036, AL049869, |
| | | | | | AL008719, AC004962, AF031078, AF030876, |
| | | | | | AC004686, AF003626, AL135783, AC000353, |
| | | | | | AC008154, AC005094, AP000245, AP000128, |
| | | | | | AP000206, AC005874, AF134471, AL031228, |
| | | | | | AC004470, AC004797, AC005377, |
| | | | | | AC006952, AC006390, AL096703, |
| | | | | | AC005900, AC003663, Z95889, AC003037, |
| | | | | | AC002352, AC003074, AC004912, |
| | | | | | AF015262, AJ229043, Z68164, AC005915, |
| | | | | | AC004887, AL022098, AL031733, |
| | | | | | AC007298, AC007021, AL034417, |
| | | | | | AL009181, AC005291, AL139054, |
| | | | | | AC005244, AC002530, AC007563, |
| | | | | | AC005013, AC004778, AL078638, |
| | | | | | AL078584, AC004890, AJ229042, AC004664, |
| | | | | | AC007263, AC007363, AC002465, |
| | | | | | AC005284, AC004383, AL022724, |
| | | | | | AL035420, AL121576, AL049611, AL049839, |
| | | | | | AP000032, AC004822, AC007279, AL031577, |
| | | | | | AC000393, AC005531, Z93020, AF064858, |
| | | | | | AC005071, AC003029, AC002425, |
| | | | | | AL031584, AC003104, AL096701, AL078581, |
| | | | | | Z93244, AC005566, Z97181, AC005520, |
| | | | | | AC005736, AJ229041, AC007392, AL122003, |
| | | | | | AL080277, AP000088, AC007425, AC005081, |
| | | | | | AC007707, AC005368, AC002492, U95740, |
| | | | | | AC004216, AP000250, AC004963, |
| | | | | | AC005529, AC006449, AC007055, |
| | | | | | AC005411, AC006123, AC006538, |
| | | | | | AC007993, AL080242, AC005378, and |
| | | | | | AC004983. |
| HCHMV63 | 26 | 1194831 | 1-1352 | 15-1366 | AA528091, AI937130, AL043928, AA512928, |
| | | | | | AI003767, AI950845, AI681293, AW020408, |
| | | | | | AI126197, AW189101, AA421192, N56993, |
| | | | | | AI498013, AA278851, AI081289, W76552, |
| | | | | | AA285337, AI568488, AA609588, W74357, |
| | | | | | AA417379, AI272841, AI634849, AI082525, |
| | | | | | H72715, AA862669, AA370112, F37679, |
| | | | | | R48578, AA508735, R18652, R09304, |
| | | | | | AA993015, T73701, AW193459, AW027819, |
| | | | | | AA508168, AI383524, AA298483, AA428290, |
| | | | | | AI608919, AI916400, AA360685, AI001776, |
| | | | | | AW189612, R09199, 1197957, AI371477, |
| | | | | | R48679, AA706851, AA766418, AI222565, |
| | | | | | AA565335, AA548319, AA428723, N73552, |
| | | | | | T73726, R73134, R73194, AA298688, |
| | | | | | AI349777, AI266766, AI251698, AW274324, |
| | | | | | AI254621, and AW268781. |
| HCWKB72 | 27 | 1194055 | 1-1667 | 15-1681 | AA828260, AI141283, AA725020, AA193339, |
| | | | | | AA506758, AW235758, AW205256, |
| | | | | | AI805548, AI805364, and AF048977. |
| HFPCT53 | 28 | 1162396 | 1-1049 | 15-1063 | R37669. |
| HDTBW62 | 29 | 1222829 | 1-3011 | 15-3025 | AW237401, AI950812, AW131361, |
| | | | | | AW104061, AI332421, AI571939, AI569994, |
| | | | | | AW392488, AA506012, AI969698, AI970981, |
| | | | | | AW392477, AA2I8990, AW392476, |
| | | | | | AA470145, H29400, AA938113, H44981, |
| | | | | | AI709076, R36314, AA380279, F07555, |
| | | | | | AW149266, AA639967, AA336314, |
| | | | | | AI869822, AA327744, AI553704, AA741222, |
| | | | | | R49246, D61949, T10753, and T82938. |
| HEFMB30 | 30 | 1037295 | 1-423 | 15-437 | AI813271, AI796347, AI459195, T71268, and |
| | | | | | AA702812. |
| HMSKIF13 | 31 | 708207 | 1-387 | 15-401 | AA148393, AC023891, and AC023891. |
| HAHDI40 | 32 | 710790 | 1-642 | 15-656 | A979303, AI627654, AI762005, AI627344, |
| | | | | | AI308065, AW138446, AI636384, W67420, |
| | | | | | AI825690, AW025834, AI190111, AI921024, |
| | | | | | W67304, AW082705, AW204142, and |
| | | | | | AF086254. |
| HAPOR59 | 33 | 1133414 | 1-430 | 15-444 | AW407636, AA805331, AA609056, and |
| | | | | | AC007444. |
| HFCAG94 | 34 | 1126368 | 1-1007 | 15-1021 | AA338681, AI634187, AW069227, |
| | | | | | AL079734, AI457313, AI004591, T50676, |
| | | | | | AI206841, AA629412, AI469599, AI912401, |
| | | | | | AI189682, AI978782, AA568314, AA879053, |
| | | | | | AI962030, AA021561, AA559330, AI491765, |
| | | | | | AW419389, AI096421, AW117704, W32376, |
| | | | | | AA176605, AI792575, AI054398, AA493110, |
| | | | | | AA600202, AW083102, AA828637, |
| | | | | | AI908093, AW117723, AI431513, AA610433, |
| | | | | | AW082104, AA773463, AW081485, T47138, |
| | | | | | AI866580, AI653776, AI620992, F24745, |
| | | | | | AW083934, AA456924, AA550989, |
| | | | | | AI280504, 1129914, AA535216, AA572974, |
| | | | | | AA056250, AA219349, AW089950, |
| | | | | | AC002477, AP000557, AC007182, |
| | | | | | AC010205, AC005409, AP000556, |
| | | | | | AC005844, AC006312, U78027, AL050307, |
| | | | | | AL049569, AC004814, AP000359, AP000045, |
| | | | | | Z82215, AC003006, AC005043, AC005324, |
| | | | | | AL096701, AL022396, AC004382, |
| | | | | | AC005102, AF205588, AF095901, AC005225, |
| | | | | | AB003151, AC016025, AL035071, |
| | | | | | AL034548, AC008123, AC006441, D88268, |
| | | | | | L34294, AP001113, AC007637, Z94802, |
| | | | | | AC007546, AC005971, AL117344, |
| | | | | | AL021977, AL109628, AC007731, AF130343, |
| | | | | | M87889, AC005500, AC005920, AC003667, |
| | | | | | AP000299, AC004907, AC004149, |
| | | | | | AC004816, AC005014, AC016026, Y10196, |
| | | | | | AC007298, AC005559, AF207550, |
| | | | | | AC004408, AC002476, AC005189, |
| | | | | | AC004966, AP0G0501, AP000212, AP000134, |
| | | | | | Z83840, AL078638, AL049843, AL023283, |
| | | | | | AF134726, AL049780, AL035417, Z84488, |
| | | | | | AC002310, Z83844, AC002350, AC005231, |
| | | | | | AL121658, Z81364, AF187320, AC007055, |
| | | | | | AL031228, AC006023, AL137191, |
| | | | | | AC005215, AC004000, AP000030, |
| | | | | | AC006449, AC004771, AC000028, |
| | | | | | AC004068, AC007308, AC001228, |
| | | | | | AC005399, AL031602, AC006530, |
| | | | | | AC005082, AC004491, AL022336, |
| | | | | | AL049874, AC005015, AP000115, AC007225, |
| | | | | | AC002369, AF053356, Z97183, AC002312, |
| | | | | | AC002553, AC004656, AL031672, |
| | | | | | AL031005, AC002375, AP000252, AC004605, |
| | | | | | AP000558, AC005619, AP000690, AC006084, |
| | | | | | AL122020, AC002504, AL008730, |
| | | | | | AC000086, U81031, AC002115, AL133445, |
| | | | | | AF124523, AC004224, AC003043, Z86090, |
| | | | | | U89335, D88270, AC002128, AC009516, |
| | | | | | AP000065, AC006480, AC005933, |
| | | | | | AC004543, AC006948, AP000362, AL021808, |
| | | | | | AC002546, AF217403, AC000353, |
| | | | | | AC004883, AL021453, AC008056, |
| | | | | | AL079342, AC002544, AC005363, Z84466, |
| | | | | | AC002070, AL033527, AC004973, |
| | | | | | AC003070, AL117330, AC005859, |
| | | | | | AC006468, AC005071, AP000358, |
| | | | | | AC005049, AL031257, AC007686, |
| | | | | | AC003692, AL035681, AC006101, |
| | | | | | AL049759, AC004686, AL034429, |
| | | | | | AC007565, AC005756, AB023049, |
| | | | | | AL132668, AC007878, AC002463, |
| | | | | | AL031289, AC005821, AL035683, U75285, |
| | | | | | AC004878, AL139054, AC003690, |
| | | | | | AC003101, AC000029, AL031431, |
| | | | | | AL023513, AF111168, AC005516, AC005846, |
| | | | | | AL031315, AC004997, AL034420, |
| | | | | | AC004106, AC005566, AL034402, AF024533, |
| | | | | | AC005837, AL008726, Z84487, Z95331, |
| | | | | | U62293, AL034555, AL031291, AC006285, |
| | | | | | U91326, AL035587, AP000692, AC006511, |
| | | | | | AL035086, AL049872, AC000118, |
| | | | | | AC005585, AL021707, AC007664, Z97056, |
| | | | | | AC004834, AL031685, AC005839, |
| | | | | | AL078624, AC002287, Z98941, AC002994, |
| | | | | | AL031594, AC006139, AC003108, |
| | | | | | AL050341, AC004999, AC004882, |
| | | | | | AC002316, AC002425, AC008134, |
| | | | | | AF045555, AL035249, AC005081, AC006965, |
| | | | | | AC005531, AC006071, AL034423, |
| | | | | | AC005822, AC007160, and AC003684. |
| HSPAB58 | 35 | 1124746 | 1-510 | 15-524 | AI718112, AA702244, and H64345. |
| HLHCT68 | 36 | 764745 | 1-425 | 15-439 | R91150, H67895, AI205078, Z25012, C05212, |
| | | | | | Z30134, AA194359, AC010344, AC010344, |
| | | | | | AC010344, AC008496, and AC008496. |
| HBIBF78 | 37 | 1127991 | 1-1278 | 15-1292 | R67200. |
| HLJDQ79 | 38 | 1127472 | 1-597 | 15-611 | AI309853, AI279001, AI346808, AW262866, |
| | | | | | AA845409, AW069609, AW269884, |
| | | | | | AI222714, AI814396, AI090041, AI261831, |
| | | | | | AW026873, AI926707, AI189010, M923918, |
| | | | | | AA418804, AI696996, AI355341, AA682734, |
| | | | | | AI082019, AA946929, AI276623, AI078444, |
| | | | | | AI283259, AA948662, W86206, W19270, |
| | | | | | AI026034, AI198813, AA639042, R60830, |
| | | | | | AI800667, AA845895, AI797428, AI797924, |
| | | | | | AA876070, AA223983, AI802422, AI268914, |
| | | | | | AW072253, AI040868, N75887, AI033779, |
| | | | | | AI080435, AA847577, AA972508, W19281, |
| | | | | | AI765686, AA632071, AI499971, N33524, |
| | | | | | W04633, N22110, H16580, AI738872, |
| | | | | | AW022940, AA628361, H88786, AA558544, |
| | | | | | AA834982, AI079661, AA580038, N50677, |
| | | | | | AA835537, AI375877, H07082, AA864215, |
| | | | | | W31728, AA709294, AA487933, AA487934, |
| | | | | | H13730, R45566, H68554, AI922644, H89004, |
| | | | | | AI244053, R49016, AI708537, AA247866, |
| | | | | | N74694, AI950614, AA526994, W25374, |
| | | | | | W25452, AA233297, AA418977, AI497736, |
| | | | | | AL079657, and L26335. |
| HNHEQ86 | 39 | 785580 | 1-117 | 15-131 | AC024653 |
| HWAAE95 | 40 | 1134932 | 1-1855 | 15-1869 | AI452836, AW117860, AI865213, AI921706, |
| | | | | | AI358384, AA720582, AW151541, |
| | | | | | AL041375, AA747375, AI755214, AI754567, |
| | | | | | AI370475, T05834, AI754105, AA809125, |
| | | | | | AA493808, AI078409, AI524453, AI521525, |
| | | | | | AA365586, AA584489, AA533408, |
| | | | | | AA468322, AI280535, AI859834, T51832, |
| | | | | | AA604843, AW238712, AW020150, |
| | | | | | AA829036, AA584765, AA526414, |
| | | | | | AL038842, AI800426, AI860423, AA665645, |
| | | | | | AL044489, AL042113, AA523812, |
| | | | | | AW075979, H93293, AI801563, AI249688, |
| | | | | | AA584603, H05940, AA812058, AA013168, |
| | | | | | AA410788, AW103006, AA679946, |
| | | | | | AA644090, AA908329, AA634209, |
| | | | | | AA019973, AI017251, AI581486, AW271917, |
| | | | | | AW118529, M377413, N25304, AA632845, |
| | | | | | AA570441, AI570943, AA262752, AA829065, |
| | | | | | AA904211, AA420723, AA665449, |
| | | | | | AA779783, AW238127, N39388, AA904275, |
| | | | | | AA526424, AI751180, Z98743, AL049869, |
| | | | | | AD000092, AC005874, AF134471, |
| | | | | | AC002045, AP000301, Z83826, AL049694, |
| | | | | | AC005899, AC005913, AC004832, |
| | | | | | AC007437, AL049843, AP000045, AC007350, |
| | | | | | AC004009, AL049589, AC006251, AF038458, |
| | | | | | AC004464, AC006039, AC005527, |
| | | | | | AC002416, AC008123, Z83846, AP000053, |
| | | | | | AP000168, AP000121, AC020663, AC005776, |
| | | | | | AC004263, AC005529, U95743, AL035610, |
| | | | | | AC005005, AL049766, AC005081, AF196972, |
| | | | | | AL034420, AC005755, AL031622, |
| | | | | | AC004841, AC002126, AC003109, |
| | | | | | AC005599, AC006312, AC009181, |
| | | | | | AC005304, AC004817, AC005666, |
| | | | | | AC007386, AP000238, AC002316, Z98256, |
| | | | | | AP000094, AL031297, AP000113, AC002039, |
| | | | | | AC003098, AC005255, AL031281, X55448, |
| | | | | | AC003043, AC005180, AC002544, |
| | | | | | AC000120, AC004743, AL031427, |
| | | | | | AC007537, AL035420, Z99128, AC008012, |
| | | | | | AL139054, AL050348, AL031722, AP000502, |
| | | | | | AL008631, AC004225, AF088219, AC005004, |
| | | | | | AC007993, AC007193, Z99754, AC004382, |
| | | | | | AC004874, AC006597, AF111169, |
| | | | | | AC009247, AC006057, AC007377, |
| | | | | | AP000065, AC004755, AP000692, AC003101, |
| | | | | | AC005019, Z93244, AC003956, Z82190, |
| | | | | | AL022323, AL034351, AC005726, |
| | | | | | AC005747, AL109656, AC004022, |
| | | | | | AC005670, AC007225, AC009498, |
| | | | | | AL121576, AC005206, AP000152, AC004754, |
| | | | | | AJ011712, AP000512, U82828, AF001549, |
| | | | | | AC002044, AC004659, AC005015, |
| | | | | | AC005667, AP000359, AL031587, AB015355, |
| | | | | | AL021978, AL034423, AP000326, AC003042, |
| | | | | | L78833, AL022320, AC008928, AC005553, |
| | | | | | AC016025, AP000300, AC005548, |
| | | | | | AC004858, AL024507, AE045555, AC004000, |
| | | | | | Z95115, U95090, AL109627, AL022721, |
| | | | | | AC004984, AP000169, AP000122, AP000054, |
| | | | | | AF111168, Z98200, AC005736, AC002094, |
| | | | | | Z98752, AC005060, Z93017, AC007283, |
| | | | | | AC007637, AC005037, AC002347, |
| | | | | | AL096712, AL133448, Z98742, AL109733, |
| | | | | | AC000075, AC005070, AC006088, |
| | | | | | AC004921, AC006023, AC005971, |
| | | | | | AP000289, AC005306, AL049709, Z94044, |
| | | | | | AC005516, Z49154, AC002400, AC008040, |
| | | | | | AP000042, AP000110, AP000689, AB004907, |
| | | | | | AP000103, AC008101, AB019438, AL133245, |
| | | | | | AC005377, AL078581, AC006449, |
| | | | | | AL080243, AC004174, AC004799, L44140, |
| | | | | | AC005006, AC009946, AC009248, |
| | | | | | AL009181, AC002381, AL034548, AL008582, |
| | | | | | AC006271, AF207550, AL022328, AP000135, |
| | | | | | AL022326, AC007263, AC004525, |
| | | | | | AC004834, AL031283, U78027, AC003035, |
| | | | | | AP000011, AL021877, AL022316, AC002394, |
| | | | | | AF020515, AP000031, AL079295, AC005247, |
| | | | | | AC006373, AL121652, Z71183, AC005833, |
| | | | | | AL023281, AC007666, AP000501, AC004595, |
| | | | | | AL035415, AC004967, AP001038, AC009516, |
| | | | | | AP000215, AC015853, AL137191, AC007226, |
| | | | | | AC004655, AC008984, AC006948, Y14768, |
| | | | | | AC005356, AC004383, AC008062, |
| | | | | | AC006013, AB014078, AP000514, AP000555, |
| | | | | | AL049871, AC006285, AC004408, |
| | | | | | AC018633, and AF134726. |
| HLMAC70 | 41 | 1127690 | 1-922 | 15-936 | AI890962, AI285687, AW367205, |
| | | | | | AW296559, R55594, U91543, and AF006515. |
| HTLAQ18 | 42 | 811792 | 1-649 | 15-663 | AA442624, AI382107, AA009701, and |
| | | | | | AL133054. |
| HTOIA82 | 43 | 844319 | 1-401 | 15-415 | H04212, AC012446, and AC012446. |
| HUVHP54 | 44 | 1199609 | 1-1919 | 15-1933 | AW360965, AL036039, AI951240, AI765501, |
| | | | | | AA211734, W63553, AW188545, AA112034, |
| | | | | | AI982523, AA316041, AW271852, AI054414, |
| | | | | | AL138265, AI110760, AA081138, AI457389, |
| | | | | | AL042905, AL042906, AA211024, |
| | | | | | AL037632, AW157180, U51704, AL138254, |
| | | | | | AA297145, AL036038, AA601230, |
| | | | | | AA577824, AW131249, AL044339, |
| | | | | | AL044340, AA071151, AW088689, |
| | | | | | AA633892, AA708108, AA526759, |
| | | | | | AF034176, AW409807, AA742815, |
| | | | | | AI694178, AA527963, AI038990, AL042539, |
| | | | | | R26717, AI907046, AA486896, AA736713, |
| | | | | | AI863046, AI583978, AA618412, AW157616, |
| | | | | | N23913, AI076616, R26941, AI951863, |
| | | | | | AW008212, AA577878, AA634991, |
| | | | | | AI799545, AI125167, AI355495, AA046906, |
| | | | | | AA157876, AA504951, AL041895, |
| | | | | | AW188427, AW102955, N23097, AI816537, |
| | | | | | AA287618, AI800168, AI800180, AI053623, |
| | | | | | F28204, AI310464, AL120269, AA601278, |
| | | | | | AI468006, AW089861, AA317168, AI821044, |
| | | | | | AI871691, AA230075, AA470582, AL047481, |
| | | | | | AI631119, AA224525, AA598663, AA482323, |
| | | | | | AA908857, AI346122, AI744188, AA470577, |
| | | | | | AA704101, AA653823, AA610271, |
| | | | | | AA126635, T63408, AW103509, AA629679, |
| | | | | | AW248523, AA613164, AA223932, |
| | | | | | AA019793, AA569600, AI445934, AL044489, |
| | | | | | AL120008, AA568314, AA206044, |
| | | | | | AA284247, AA580560, T74524, AA834799, |
| | | | | | AI561210, AW169057, AI929825, AA481760, |
| | | | | | AA904211, AA525807, AL042891, |
| | | | | | AL048901, AA302628, AA838140, |
| | | | | | AA782322, AI755057, AA551204, AI884522, |
| | | | | | AA632581, AA533025, AL046746, |
| | | | | | AA130647, AC005619, AC005081, |
| | | | | | AL121603, AC004858, AC006449, AP000117, |
| | | | | | U89337, AC004099, AC005231, Z83844, |
| | | | | | AC005180, AC006111, AP000512, |
| | | | | | AC002303, AC005488, AL031311, |
| | | | | | AC005015, AC003109, AC005736, |
| | | | | | AC002418, AC005821, AP000208, AP000130, |
| | | | | | AL021393, AC004813, AC011311, |
| | | | | | AC006285, AC007686, AC004386, |
| | | | | | AL031680, AC003692, AC000025, |
| | | | | | AC005722, AC007242, AL132987, |
| | | | | | AC004760, AC005529, AC005527, |
| | | | | | AL035071, AL021918, AC005225, AL031432, |
| | | | | | AF207550, AP000050, AP000555, AF196971, |
| | | | | | AP000501, AL035443, AL109798, AC008498, |
| | | | | | AC005484, AL078581, AC006011, |
| | | | | | AC007546, Z83840, AC005924, AC007537, |
| | | | | | AC009247, AC006001, AC004895, |
| | | | | | AP000313, AL022318, AC005220, AC006480, |
| | | | | | AC005399, AL121653, AC006064, |
| | | | | | AC006241, AC006101, Z98304, Z93023, |
| | | | | | AC004150, AF196779, AC005746, AL080243, |
| | | | | | AL135744, AP000553, L78810, AC004832, |
| | | | | | AC004929, AL021154, AC016027, |
| | | | | | AL009181, AL022163, Z85986, AC004686, |
| | | | | | AC002301, AL035079, AC005264, |
| | | | | | AC006965, AC005971, U95739, AC004638, |
| | | | | | Z98742, AL024498, AL049776, AL034423, |
| | | | | | AC004491, AC004953, AC002425, |
| | | | | | AL049872, Z94801, AC006430, AC004865, |
| | | | | | AC007057, AL022336, AP000113, AL022326, |
| | | | | | AC004531, AP000045, AC004000, |
| | | | | | AC005007, AC005089, AC005881, |
| | | | | | AL031283, AC005486, AC004253, |
| | | | | | AC016830, AC002369, Z85987, AC005829, |
| | | | | | Z99716, AC005102, AC004890, AC007011, |
| | | | | | AC005535, AL096701, AL022316, |
| | | | | | AC007731, AC007066, AC003101, |
| | | | | | AF045555, AC005412, U15177, AC007055, |
| | | | | | AC002470, AC003108, AC005500, AJ246003, |
| | | | | | AL139054, AC005778, U85195, AP001053, |
| | | | | | AC008273, AC008044, AC002477, |
| | | | | | AC006538, AC005099, AC007292, |
| | | | | | AL022396, AF111167, AC002430, AC007919, |
| | | | | | AC004383, AL049829, AC005696, |
| | | | | | AC005520, AC000353, AC004522, |
| | | | | | NP000300, Z98044, AC006511, AC007676, |
| | | | | | AF024533, AC002565, AL031584, AC005189, |
| | | | | | AL121658, AL049759, AL050318, AC004991, |
| | | | | | AC005049, AL022721, AP000030, AC007384, |
| | | | | | AC006211, AE000658, AL118516, |
| | | | | | AC004973, AF196972, AC008115, |
| | | | | | AC003663, AC005884, AC005562, |
| | | | | | AP000557, AL022323, AC002544, AC005755, |
| | | | | | Y14768, AC004963, AC005251, AC007030, |
| | | | | | Z84487, AC004079, U95742, AC007308, |
| | | | | | AC009509, AL035086, U89335, AF001550, |
| | | | | | AC007690, AC005005, AC006966, |
| | | | | | AF003529, AC004854, AC005899, |
| | | | | | AC004242, AC004922, U95090, AL133289, |
| | | | | | AC007225, AC004797, AC002128, |
| | | | | | AL096791, AF064861, AC006006, AC005229, |
| | | | | | AC006512, AL031005, AL049780, |
| | | | | | AC007227, AC005874, AF134471, |
| | | | | | AC005071, AC004263, AR036572, U91328, |
| | | | | | AC004602, U47924, AC004815, AL022313, |
| | | | | | AC007664, AC002351, AC005940, |
| | | | | | AB003151, AL050307, AC004876, |
| | | | | | AC007216, AF196969, AC006125, |
| | | | | | AC006530, AL035422, AC005328, |
| | | | | | AL121652, L44140, AP000270, AP000691, |
| | | | | | AL021707, AC007240, and AC004703. |
| HEOPE58 | 45 | 851009 | 1-463 | 15-477 | AL078634, AP000117, AP000194, AP000313, |
| | | | | | AP000050, AL078634, AL078634, and |
| | | | | | AL078634. |
| HE8AE26 | 46 | 1136129 | 1-1057 | 15-1071 | AA331521, AA331463, AC004878, |
| | | | | | AC005071, AC006480, AC002551, |
| | | | | | AC004084, AC005088, AC006014, |
| | | | | | AF030453, AC005488, AC005184, |
| | | | | | AC004447, and AC006001. |
| HHFOO84 | 47 | 857780 | 1-368 | 15-382 | |
| HNHHF46 | 48 | 1126320 | 1-1304 | 15-1318 | AW137103, AW302615, AA913635, |
| | | | | | AI765662, T91047, AI525136, AA393986, |
| | | | | | AI056765, T83834, N59019, AA913173, |
| | | | | | N53925, AA700668, R08314, AI580501, |
| | | | | | R08368, AI018028, AW081040, T93861, |
| | | | | | T83670, AI307635, AW300106, AW300120, |
| | | | | | AA398023, W04363, and AC008989. |
| HISAM68 | 49 | 1129136 | 1-521 | 15-535 | AI733671, AI439165, AI479274, AI913259, |
| | | | | | AI831958, AI017843, AI739264, AW052131, |
| | | | | | AI831355, AA282596, AI793039, AI793216, |
| | | | | | AI261362, and AI792395. |
| HEQAY32 | 50 | 869178 | 1-1169 | 15-1183 | AA459604, AA703415, AA703508, AI337830, |
| | | | | | AI924185, AA993540, AA398958, AA047107, |
| | | | | | AI581879, R50486, AA399541, AA826082, |
| | | | | | AA047244, AI570681, AW007699, |
| | | | | | AA742413, AI278602, AI479681, AA810070, |
| | | | | | AI346375, AI468327, AA766769, AI721136, |
| | | | | | AA317334, AI378094, H08229, AA878088, |
| | | | | | AI269575, T36249, AA878089, M78847, |
| | | | | | H08868, AW138078, AA322162, AI824732, |
| | | | | | F04540, F04098, AI383526, F02816, R50380, |
| | | | | | AA383971, AJ444981, AI953863, and |
| | | | | | AB033004. |
| HSSJM44 | 51 | 871067 | 1-1034 | 15-1048 | AA402834, AA313382, T75200, H10173, |
| | | | | | Z46198, T34442, R13072, AA357096, |
| | | | | | AA383450, T07941, AC026352, A0026352, |
| | | | | | AC069443, AC069443, AC068755, and |
| | | | | | AC068755. |
| HCWDL45 | 52 | 1137793 | 1-1175 | 15-1189 | Z98747. |
| HTNBM01 | 53 | 910705 | 1-638 | 15-652 | AA298841, and Z28624. |
| HAHEF22 | 54 | 910996 | 1-872 | 15-886 | AA447298. |
| HOSFZ73 | 55 | 1128494 | 1-761 | 15-775 | AI879394, AI653605, AI678785, N57282, |
| | | | | | AI634691, AW157492, AI703492, AI270524, |
| | | | | | AA086150, AA725075, N67343, AA100379, |
| | | | | | W26914, AA345063, AL046409, AI284640, |
| | | | | | AW274349, AI733856, AW020088, |
| | | | | | AI754955, AI753488, AI061313, AW419262, |
| | | | | | AL138455, AA610509, AI821714, AI792133, |
| | | | | | AI791913, AW265385, AI753113, AA579179, |
| | | | | | AA410788, AI431303, AI805547, AL079645, |
| | | | | | AA651639, AA127426, AL038936, |
| | | | | | AW062724, AI801505, AA226584, AI783911, |
| | | | | | AA747009, AL041690, AW270256, |
| | | | | | AI620585, AL046746, AI821785, AI754023, |
| | | | | | AI307201, AA574442, H71429, AA483223, |
| | | | | | AW303196, AL134330, AA581903, |
| | | | | | AA515728, AW193265, AW301350, |
| | | | | | AI801482, AW157456, AW162697, |
| | | | | | AI267356, N66026, AA719073, AW072923, |
| | | | | | AA101689, T74524, AI885572, AI267450, |
| | | | | | AL039187, AI925321, AW247819, AI755202, |
| | | | | | AA583394, AW243793, AW406755, |
| | | | | | AI066646, AL048925, AI635819, AW407578, |
| | | | | | AA584484, AA719292, AL037910, AI963720, |
| | | | | | AA457249, AI613280, AI805363, AW304584, |
| | | | | | AA130647, H53168, AI687343, AW167154, |
| | | | | | AA665330, AA714011, AL042856, |
| | | | | | AW068316, AI278972, AI859280, |
| | | | | | AW191886, AA507282, AA521323, |
| | | | | | AA879053, AI457597, AC004020, AC005601, |
| | | | | | AC004805, AC004974, AC005387, |
| | | | | | AC004019, AL034420, AC005365, |
| | | | | | AB017602, AL080317, AL121595, AL139054, |
| | | | | | AL031257, AL022323, Z83826, AC005666, |
| | | | | | AC002126, AC002996, AC006213, |
| | | | | | AC004973, AF042091, AC005154, |
| | | | | | AC006312, AL121652, AC007298, U66059, |
| | | | | | U50871, D83989, AF015416, AL034555, |
| | | | | | AC005244, AC003983, Z98048, Z84488, |
| | | | | | AC006511, AL121603, AY190465, AL110502, |
| | | | | | AC005971, AC005940, U57009, AC007919, |
| | | | | | U95742, AC005288, AC004659, AL031674, |
| | | | | | X54176, AC005694, AC007051, U80017, |
| | | | | | AL009179, AF015156, AF015156, U18391, |
| | | | | | AC005908, U18394, AF134726, AC004816, |
| | | | | | AC006449, AL031005, X54181, L78833, |
| | | | | | X54180, AC006480, AC005102, AC010197, |
| | | | | | X54175, AC002457, AL031319, AL022336, |
| | | | | | AC007938, AC005015, AL022326, Z93017, |
| | | | | | AC000052, AP000402, AC005736, AL021808, |
| | | | | | AC004891, Z85987, AC006251, AC006111, |
| | | | | | AC006112, AC004999, AL096771, |
| | | | | | AC005216, AC005529, U57007, U47924, |
| | | | | | AC009516, AL080241, AC006001, X55925, |
| | | | | | AC002316, AP000553, AF001549, Z93016, |
| | | | | | AL030996, AL031311, AC003006, |
| | | | | | AC004125, AC003982, AC005306, |
| | | | | | AC005632, AC007243, AL132992, U85195, |
| | | | | | AC007285, AL031433, AC005699, |
| | | | | | AC005486, AC007425, AC004099, |
| | | | | | AC005031, AC005808, AL050318, |
| | | | | | AC005340, AE000658, AL022143, AL096701, |
| | | | | | AP000088, AC008123, Z82190, AC005229, |
| | | | | | X54178, AL121653, U18393, AC008064, |
| | | | | | AF107885, AC006430, Z98050, AC004596, |
| | | | | | AC006241, AC005740, AC007216, |
| | | | | | AC002377, U29953, U91326, AC005245, |
| | | | | | AC009247, AC004821, AC005071, U91327, |
| | | | | | AP001046, U78027, AC002310, AL021453, |
| | | | | | U08988, AC008372, AP001054, AC000111, |
| | | | | | AC006581, AC005548, AC007364, |
| | | | | | AL049830, AL049643, L44140, AC004953, |
| | | | | | AP000513, AL031286, X53550, AL035587, |
| | | | | | AC005768, AL031650, AE109907, AF015157, |
| | | | | | AL035422, AC005353, AC006539, |
| | | | | | AL049713, AL035410, AC000134, |
| | | | | | AC005619, AC002350, AL031053, AF053356, |
| | | | | | AL008718, U57005, AC007536, AC004496, |
| | | | | | AL034418, AC002470, AC005563, |
| | | | | | AC008115, AL031280, AC005701, L47234, |
| | | | | | AC007151, AP000557, U18392, U18387, |
| | | | | | AL133245, AC005210, AC003109, |
| | | | | | AC004534, AC002385, AL078463, |
| | | | | | AC006547, AF165176, AC005393, |
| | | | | | AC005746, AL022721, AL078644, AL096767, |
| | | | | | AC005833, AF015149, AL079340, AC005899, |
| | | | | | AL024495, AC005189, S43650, U02532, |
| | | | | | AC005921, AC004996, AL035405, AF015148, |
| | | | | | AC005019, AP000547, AC005323, |
| | | | | | AC005726, X54177, AC000026, AL049829, |
| | | | | | AL031848, Z82244, AC005874, AF134471, |
| | | | | | AC005682, Z84480, AL049766, AP000152, |
| | | | | | AL080250, AP000555, AL021546, AC007274, |
| | | | | | AC004518, AC004032, AC005924, |
| | | | | | AL034549, AC005274, AC004626, |
| | | | | | AC004858, Z81364, U75931, and AL049795. |
| HDPTQ41 | 56 | 1189814 | 1-625 | 15-639 | AI878836, AI380704, AI949156, AI335537, |
| | | | | | AI359669, AI375465, AI279500, AI658822, |
| | | | | | AW001512, AI916799, AI436769, AA316348, |
| | | | | | AI879396, AW014195, AW301192, |
| | | | | | AI767924, AI652095, AA028103, AW299794, |
| | | | | | AW236028, AI439173, AW301212, |
| | | | | | AA970314, AI824939, F35913, AA977296, |
| | | | | | AW135461, AI927228, AA501553, D19636, |
| | | | | | AI915866, AA636041, AA603060, AA307748, |
| | | | | | AI823483, AA625548, AI478932, AA062899, |
| | | | | | AI470601, AI419586, AA028124, AA488040, |
| | | | | | AI760094, AA304578, and L12982. |
| HDPXN01 | 57 | 1128577 | 1-387 | 15-401 | AW196757, AI093809, AA912880, |
| | | | | | AA101088, AI651231, AI627422, W94251, |
| | | | | | W94274, AI867562, H06521, H20526, |
| | | | | | AI340603, AW162189, AW403717, |
| | | | | | AL045903, AA635382, AI538885, AL050108, |
| | | | | | 189944, AL117649, AL122098, AL137273, |
| | | | | | AL049938, AJ003118, and I80064. |
| HCEOR02 | 58 | 921110 | 1-545 | 15-559 | AA325666. |
| HCFLI54 | 59 | 921382 | 1-631 | 15-645 | AA835065, AI634477, H04996, AI092992, |
| | | | | | R12577, R12489, T98498, AI807696, |
| | | | | | AI701147, AI336678, Z39187, R42405, |
| | | | | | R38979, R42406, AI376737, AA243599, |
| | | | | | F10155, AA554471, AA758778, AA417699, |
| | | | | | AI445600, AI004105, AA211467, AA211477, |
| | | | | | AI363083, AW150977, AA953676, F02234, |
| | | | | | AA356905, AA193346, AA193464, AI420621, |
| | | | | | AA910341, AI696583, AA836213, AC005562, |
| | | | | | AL035658, Z54386, AC023278, AC023278, |
| | | | | | AC023278, AC005562, and AC005562. |
| HIBEV89 | 60 | 1112107 | 1-1088 | 15-1102 | AA352026, D81625, AA457053, and |
| | | | | | AF137367. |
| HWLUL28 | 61 | 925331 | 1-738 | 15-752 | AA312283, T85523, F06560, AA669475, and |
| | | | | | AF044574. |
| HLMDO95 | 62 | 928344 | 1-469 | 15-483 | AC020641. |
| HCFCV92 | 63 | 1126274 | 1-911 | 15-925 | AI623716, AI458826, AA831121, AI280154, |
| | | | | | AI557306, AI500033, AI623717, AA768629, |
| | | | | | and AA687968. |
| HLHDD45 | 64 | 1127882 | 1-870 | 15-884 | AI064968, AW410844, AA621720, |
| | | | | | AA180857, AW192930, AL138262, |
| | | | | | AA757406, AW265468, N78600, AW148821, |
| | | | | | AI702049, AI002952, AI445699, AA846014, |
| | | | | | AA300049, AA147521, AL121039, |
| | | | | | AA311362, AA172103, AA359864, |
| | | | | | AA373955, AW139566, AA330694, W07340, |
| | | | | | AI129355, AA668421, AW262572, |
| | | | | | AW162314, AW021674, AI251024, |
| | | | | | AA425283, AW157424, AI754257, |
| | | | | | AA557945, AI732720, AW419201, |
| | | | | | AW162332, AW151541, AI114755, |
| | | | | | AA533066, AA489390, AI174703, |
| | | | | | AW151848, AI547110, AA601376, AI355246, |
| | | | | | AI744199, AI254267, AA595661, AW275432, |
| | | | | | AI446618, AI572680, AI754926, AI065031, |
| | | | | | AI312267, AA533660, AW023975, N99245, |
| | | | | | AA131594, AW020682, AL039117, |
| | | | | | AA610644, AI797998, AI344906, AI318548, |
| | | | | | AA324108, AA640305, AW157128, |
| | | | | | AA525753, AA551580, AI732690, AI349850, |
| | | | | | N95424, AI889177, AW069110, AI076729, |
| | | | | | AW023390, AW327673, AI884404, |
| | | | | | AW069273, AW162762, AI732327, |
| | | | | | AI345166, AI792586, AI792498, AI039257, |
| | | | | | AI174990, AW151102, AI252611, AI003469, |
| | | | | | AI590442, AL039436, AI791659, AI744890, |
| | | | | | AA631915, AI754064, AA502450, AI567676, |
| | | | | | AA315052, AA593168, AI270280, AI310670, |
| | | | | | AA935827, AI744963, AI570067, AI312614, |
| | | | | | AI114494, AI921744, AA524604, AA828840, |
| | | | | | AA664963, AI813920, AA748071, AI890283, |
| | | | | | AW069227, AI955447, AA133568, |
| | | | | | AA523718, AA015948, AI538404, AI609992, |
| | | | | | AI221027, AW277125, AA350081, |
| | | | | | AA569220, N72678, H53546, AA669238, |
| | | | | | AA313025, AI360521, AL135420, |
| | | | | | AW020198, AL135513, AA601712, |
| | | | | | AI028148, AA535558, AI613459, AI755227, |
| | | | | | N72509, AA503144, AI431442, AW243817, |
| | | | | | AI174827, AA507623, AW029626, AI734119, |
| | | | | | AI889345, AI753131, AA084439, AW268793, |
| | | | | | AA657392, AA658890, AI819419, |
| | | | | | AW337483, AA702637, AL039471, R61887, |
| | | | | | AA807704, H47461, AW028376, AI434103, |
| | | | | | AI345256, AI745666, AI571894, AW177224, |
| | | | | | AC005821, AC008372, Z83840, AC006261, |
| | | | | | AC005701, AF196779, AC005696, |
| | | | | | AC005519, AF111168, AC005409, |
| | | | | | AC005759, AL031670, AC002565, |
| | | | | | AC007684, AC010205, AF109907, AP000557, |
| | | | | | AJ003147, AL121655, AC006511, Z98200, |
| | | | | | AC007308, AL133448, AC006509, |
| | | | | | AB016897, AP000512, L44140, AL109798, |
| | | | | | U91327, AD000092, AC006057, AC005900, |
| | | | | | AL121595, AL133163, AL035659, AC006241, |
| | | | | | AL109952, AC002039, AL121603, AL096701, |
| | | | | | AP000505, AC005527, AL096712, AL049538, |
| | | | | | AC004263, AL021808, AC002477, |
| | | | | | AL050307, Z99714, AF001549, AC000075, |
| | | | | | AL121653, Z84469, AC004125, AC005037, |
| | | | | | AC007050, AL031289, AC005618, |
| | | | | | AC005412, AC006398, AC007536, L47334, |
| | | | | | AL031255, AC005261, AC004019, |
| | | | | | AB023051, AC004041, AP000309, |
| | | | | | AC002991, AC009516, Z98742, AC005822, |
| | | | | | AC007057, Z98752, AC007676, AC005484, |
| | | | | | Y14768, AP000030, Z83844, AC004771, |
| | | | | | AJ011930, AF134726, AL096791, AC003109, |
| | | | | | AC006487, AP000553, AC005722, AL031846, |
| | | | | | AP000048, AC005071, AC004084, |
| | | | | | AC006255, AC004859, AP000250, |
| | | | | | AC005180, AC005808, AL031681, U52112, |
| | | | | | AC008044, AC005244, AP000211, AP000133, |
| | | | | | AL021453, AF196971, AC005003, Z92542, |
| | | | | | AC005768, AL031680, AC002310, |
| | | | | | AC006011, AC005212, AL031281, AP000359, |
| | | | | | AP001046, AL078477, AC005303, AC005921, |
| | | | | | AC004765, AP000503, AC007510, M63796, |
| | | | | | AC002126, AL109653, AC002375, |
| | | | | | AC006064, U93163, AL049869, AF165926, |
| | | | | | AC005632, Z84474, AL022165, AP000116, |
| | | | | | AL035684, AC004890, AL022323, |
| | | | | | AC005944, AP000555, Z98051, AC008929, |
| | | | | | AC005225, AC005228, AF207550, |
| | | | | | AC005562, AC002306, AC006146, |
| | | | | | AL022326, AC005041, AC006050, |
| | | | | | AL031666, AF129756, U96629, AC005377, |
| | | | | | AC006539, Z73979, AC006547, AL050338, |
| | | | | | AC004812, AC004584, AL021394, |
| | | | | | AC007736, U50871, AL022336, AC000379, |
| | | | | | AL022315, AC011456, AC002036, |
| | | | | | AC006088, AC009946, AC005920, |
| | | | | | AC007036, AC007371, AL022316, |
| | | | | | AC005839, AC004686, AL021579, AP000504, |
| | | | | | AF213461, AC005346, AC005175, |
| | | | | | AB011399, Z93017, AL035460, AC005274, |
| | | | | | Z97630, AC004000, AC005365, AC006388, |
| | | | | | AL080243, AC005529, AC006318, AP000556, |
| | | | | | AL049694, AL021391, AC005500, U80017, |
| | | | | | AC002472, AC004814, AL031228, |
| | | | | | AC005015, AC002312, AB023048, |
| | | | | | AC004531, AL022476, AP000511, AL020997, |
| | | | | | Z15025, AC007051, AC004895, AC005775, |
| | | | | | AL034420, AL049839, AC006942, |
| | | | | | AC012627, AC016026, AC007537, |
| | | | | | AC004106, AC005295, AC007314, |
| | | | | | AL122020, AC004685, AC004967, U95742, |
| | | | | | AB003151, AL031003, AC006455, Z93244, |
| | | | | | AL139054, AL050341, AC004476, AF001550, |
| | | | | | AL137654, AF205588, AC000353, AC005730, |
| | | | | | Z99716, AL031311, AC002351, AC007421, |
| | | | | | AC007216, AB004907, AF038458, AF053356, |
| | | | | | AC005253, AC004491, AC003688, |
| | | | | | AC003982, AC005664, Y07848, AL121825, |
| | | | | | and AC003665. |
| HHSGVI3 | 65 | 1038557 | 1-1254 | 15-1268 | AW157772, AI768325, AW072067, |
| | | | | | AW163204, D52151, D52158, C14535, |
| | | | | | D52025, AW090592, D52014, AA916782, |
| | | | | | C14534, AI589300, AI268693, D51740, |
| | | | | | D51951, R54483, D59739, 1419000, AI341953, |
| | | | | | AA627910, C14295, T15574, 1449512, |
| | | | | | AA907297, H41615, D59792, Z45247, |
| | | | | | H40838, D52130, Z41478, H19101, F08485, |
| | | | | | D51823, F04956, D51574, D59715, |
| | | | | | AA363868, T31138, R52319, H49742, |
| | | | | | H06704, F04609, C14365, T33909, T34829, |
| | | | | | AA333764, AI681322, and AL050342. |
| HDPSJ02 | 66 | 943316 | 1-1272 | 15-1286 | AA366176, AL109804, AL109804, and |
| | | | | | AL109804 |
| HBGQN46 | 67 | 945370 | 1-888 | 15-902 | AA479990, AW293680, AI473367, AI184880, |
| | | | | | AI086741, AI081183, AI214276, AA742259, |
| | | | | | AA836754, R55060, AA251267, AI285889, |
| | | | | | AI813391, AW297831, AI819671, AF038458, |
| | | | | | and AF038458. |
| HE2SN25 | 68 | 1127461 | 1-1170 | 15-1184 | AW327262, AW327616, AI769182, |
| | | | | | AA725234, M85521, AI016714, AI051725, |
| | | | | | N62194, AA483400, AA483411, AA847865, |
| | | | | | AI554330, AA902896, R60056, N66755, |
| | | | | | AA594900, AA933624, AI825794, H05474, |
| | | | | | T16298, AA977118, AI671131, AA054722, |
| | | | | | AA650410, R43427, AA916000, T34734, |
| | | | | | AA716570, AA761969, T90105, AA054669, |
| | | | | | AA342241, AA805766, AA811545, and |
| | | | | | T82929. |
| HRODF07 | 69 | 952426 | 1-324 | 15-338 | AC011597, and AC023402. |
| HE8BQ58 | 70 | 1194060 | 1-708 | 15-722 | AW360898, AW360924, W67828, AA522448, |
| | | | | | W67835, N32016, AW360960, AI803415, |
| | | | | | AI679943, AA808169, AI131493, AA677192, |
| | | | | | AI299775, AI694771, W67971, AI075655, |
| | | | | | AI719966, AW439363, N32871, AI264272, |
| | | | | | AI679433, AI037908, AW276181, AA454003, |
| | | | | | N31580, W65305, AI077995, AI032435, |
| | | | | | AI610717, R91886, W65335, AI022492, |
| | | | | | AA598921, H50213, AA682589, R92723, |
| | | | | | N41821, H98160, W67755, AA774316, |
| | | | | | AA363908, AI370035, AI659568, AI872516, |
| | | | | | AI932585, AI886059, AA909496, W80827, |
| | | | | | AI702322, AI469319, AA894457, AA948065, |
| | | | | | AA3 84221, W80948, AA911990, AA679575, |
| | | | | | C14559, AL137600, and AL096766. |
| HNHCI32 | 71 | 861673 | 1-586 | 15-600 | AF112462, and AR035954. |
| HSQCM85 | 72 | 1124689 | 1-614 | 15-628 | AL021918. |
| HPTVL90 | 73 | 509487 | 1-322 | 15-336 | AI694439, AI742084, M808204, AI458889, |
| | | | | | AI005161, AI472051, AI126407, AA994212, |
| | | | | | AI564776, AI379936, AA044826, AW418896, |
| | | | | | AA335622, AI308950, AI948596, AA996109, |
| | | | | | AI798664, AI689840, AI802140, AI570505, |
| | | | | | AI268684, AI738645, AI708063, AW166260, |
| | | | | | AI742586, AI819324, AI018575, AA983545, |
| | | | | | AI051014, AI823636, AI498702, AI948603, |
| | | | | | and AF126781. |
| HRDFA94 | 74 | 1156347 | 1-2768 | 15-2782 | |
| HCE1S21 | 75 | 1010797 | 1-495 | 15-509 | AA663839, T64371, AC007666, AC000052 |
| | | | | | and AC004019. |
| HWHHW54 | 76 | 684125 | 1-1134 | 15-1148 | AI537869, N58734, R97517, N65985, H59433 |
| | | | | | AA022869, H70636, R97516, AA011230, |
| | | | | | AA443442, AA057027, W05627, AW19267, |
| | | | | | AA808430, AA780044, AI022809, AI041819, |
| | | | | | AI986294, AI336274, W39201, AA883903, |
| | | | | | AI073467, AI740785, AI871953, AI521233, |
| | | | | | AW009412, AW157214, AA554447, |
| | | | | | AI742678, AA863294, AA937977, AI589839, |
| | | | | | AA595998, AA689601, AA932317, |
| | | | | | AW152255, AA886725, AI669406, AI034240, |
| | | | | | AI925407, AA036917, AI887353, H47150, |
| | | | | | AA846564, AI127132, AA978039, AI139401, |
| | | | | | AA806498, AA443308, AI338458, AI042442, |
| | | | | | AA890338, AA992867, AA463838, AI085301, |
| | | | | | AI263340, AA026818, AI277999, AA917926, |
| | | | | | AA854105, AI080542, AI348041, W07723, |
| | | | | | and AA460271. |
| HDPGQ74 | 77 | 1223438 | 1-3943 | 15-3957 | N31712, AL118600, N58487, AI741189, |
| | | | | | AI816927, AI797840, AW149500, AI819260, |
| | | | | | AI693960, AI827378, AW409925, AI581296, |
| | | | | | AI934753, AW295876, AI094419, |
| | | | | | AW026705, AI031621, AA447165, AI434580, |
| | | | | | AI298291, AA443793, AI924337, AI890661, |
| | | | | | AI590648, AW081058, AI0614351, AA617780, |
| | | | | | W60708, AI689288, AI310105, AW072975, |
| | | | | | AI761653, AI393142, AI032061, AI678346, |
| | | | | | AW296260, AI913605, AI339277, AA524221, |
| | | | | | AI623926, AI472781, W60770, AI024132, |
| | | | | | N70795, AA196520, AI453676, AW292215, |
| | | | | | AI583157, AI016034, AA513345, AA813380, |
| | | | | | T08803, D31273, AW085565, AA639605, |
| | | | | | D31339, AL135572, N78076, AW075684, |
| | | | | | R58936, AI282095, AW028510, AA746071, |
| | | | | | R02150, R61455, AW104232, R00910, |
| | | | | | T09383, AA661620, R14752, T98158, |
| | | | | | R31323, AA470871, AI817106, AI091558, |
| | | | | | AW239033, T98157, W01411, AI873752, |
| | | | | | R42522, AL041302, R08452, R46428, |
| | | | | | D12114, R08451, AW026023, N42367, |
| | | | | | AI263720, AA995486, AI472597, AA861918, |
| | | | | | T08132, AI824234, R31582, AI432969, |
| | | | | | AI274541, AI445025, AL121328, AI539780, |
| | | | | | AW104724, AI560099, AI538716, |
| | | | | | AW118512, AI564719, AI802542, |
| | | | | | AW026882, AI433157, AI687375, AI580984, |
| | | | | | AW150578, AI886753, AI619502, AI818683, |
| | | | | | AI637584, AI569616, AI783504, AI682841, |
| | | | | | AI625079, AL036361, AI620284, AW087445, |
| | | | | | AW192375, AI697137, AI687127, AI440239, |
| | | | | | AI799470, AI635461, AW071417, AI469532, |
| | | | | | AI445432, AL121270, AW071349, AL045500, |
| | | | | | AI610307, AL047763, AI954183, AI687728, |
| | | | | | AL036274, AI815855, AI160954, AW151485, |
| | | | | | AI696398, AL044207, AI889376, AL079963, |
| | | | | | AI580190, AI816947, AW148408, AI349004, |
| | | | | | AW086113, AI281762, AI702406, AI612913, |
| | | | | | AI499393, AL036396, AI800433, AI349772, |
| | | | | | AL038605, AW238730, AI696612, AI224992, |
| | | | | | AI271786, AI281773, AL036802, AW274192, |
| | | | | | AI800453, AI521012, AI872711, AI921379, |
| | | | | | AW162071, AI682971, AI812080, AI627360, |
| | | | | | AI590128, AI269205, AI702068, AI624206, |
| | | | | | AI250293, AI524671, AW008048, |
| | | | | | AW132056, AL040243, AI274508, AL036146, |
| | | | | | AI890833, AI636456, AI926790, AI539771, |
| | | | | | AI690480, AW103371, AI800384, AI921248, |
| | | | | | AW087462, AW129106, AI440426, |
| | | | | | AI702073, AL121365, AW301409, |
| | | | | | AW166970, AI536638, AA572758, |
| | | | | | AW118557, AI690426, AI475371, AI249323, |
| | | | | | AI758437, AI285735, AI538259, AI701074, |
| | | | | | AA853351, AI683684, AI499463, AI249257, |
| | | | | | AL043326, AI340582, AL135661, AI275175, |
| | | | | | AI281779, M570384, AI857296, AI702433, |
| | | | | | AW149869, AI282281, AI673297, |
| | | | | | AW075351, AI537303, AI631107, AI269696, |
| | | | | | AW148320, AI868831, AW183130, |
| | | | | | AI500077, AI349645, AI633419, AI498579, |
| | | | | | AI866002, AI887396, AI433976, AW169653, |
| | | | | | AI567993, AI610645, AW074993, AI567351, |
| | | | | | M536685, AI349614, AA640779, AL040169, |
| | | | | | AA613907, AI554245, I89947, I48979, |
| | | | | | AL049452, I48978, AF113694, I89931, |
| | | | | | AL117460, AL050393, AF090934, AL050149, |
| | | | | | AF090901, AL110196, AJ000937, AF090900, |
| | | | | | AF090903, AL117457, AL133016, AF104032, |
| | | | | | S68736, A08916, AF113677, S78214, |
| | | | | | AL133075, L31397, AL133606, Y11587, |
| | | | | | AL050116, AL133560, A08913, AL122050, |
| | | | | | AF113013, AF113699, L31396, AF113689, |
| | | | | | AF118070, AL049314, AF113690, AF106862, |
| | | | | | AL080060, AF090896, AL122121, Y16645, |
| | | | | | AL050146, AL050108, AF177401, AL137527, |
| | | | | | AL049938, AR059958, AF078844, AL122093, |
| | | | | | AF113691, AB019565, AL110221, AF090943, |
| | | | | | AF118064, X84990, AJ242859, AF125949, |
| | | | | | AF113676, AL133640, A93016, AL137459, |
| | | | | | AL050277, AL133557, AL096744, AF113019, |
| | | | | | AL133080, AL117583, AL117394, X82434, |
| | | | | | Y11254, AL133565, AL049466, AF146568, |
| | | | | | AF091084, I49625, AL080124, AF017152, |
| | | | | | AF079765, AL110225, U42766, AF111851, |
| | | | | | AF125948, AL133093, AF158248, AL080137, |
| | | | | | X63574, E07361, AL117585, AL122123, |
| | | | | | U91329, AL137550, X70685, E03348, |
| | | | | | AR011880, AJ238278, AL137557, U00763, |
| | | | | | AL050138, AL049430, AF017437, A08910, |
| | | | | | AF097996, AL049464, AL133113, U35846, |
| | | | | | E07108, AL137283, A65341, E02349, |
| | | | | | X65873, AL049382, AL049300, AL117435, |
| | | | | | AL137648, U72620, AL122098, AL050024, |
| | | | | | A08912, AI2297, AF118094, AL122110, |
| | | | | | A08909, AL137538, A03736, I03321, |
| | | | | | AF183393, AL137271, Z82022, A58524, |
| | | | | | A58523, A77033, A77035, AL137463, |
| | | | | | AL049283, I33392, U80742, AP067728, |
| | | | | | AL133568, X72889, AF087943, AL110197, |
| | | | | | I09360, AL080127, X96540, X93495, |
| | | | | | AL133072, AF079763, X98834, AF111112, |
| | | | | | Z72491, U67958, I26207, AL137521, |
| | | | | | AL080159, A07647, Y09972, I42402, S61953, |
| | | | | | AL137523, AF061943, E15569, AF026124, |
| | | | | | E08263, E08264, AL137526, AL050172, |
| | | | | | AL122049, AR038969, AL133077, AL133014, |
| | | | | | AJ012755, AC004227, AL133104, E05822, |
| | | | | | I17767, AF000145, AR013797, A93350, |
| | | | | | AF119337, AL137560, Z37987, AR000496, |
| | | | | | U39656, I00734, AL122111, E00617, E00717, |
| | | | | | E00778, E08631, AL023657, 166342, U68387, |
| | | | | | AF026816, AL137556, AF132676, AF061836, |
| | | | | | A08911, Y14314, AF100931, AL110280, |
| | | | | | AC006336, AF003737, AL133098, AF106827, |
| | | | | | M30514, AF057300, AF111849, AF057299, |
| | | | | | AL117440, AL080074, AL133081, Y07905, |
| | | | | | AL133067, AF162270, U49908, AF153205, |
| | | | | | X92070, U96683, A45787, AF185576, |
| | | | | | AL137429, U58996, AL122118, E02221, |
| | | | | | AF081197, X62580, AR038854, E06743, |
| | | | | | AL137705, AB007812, AJ006417, X83508, |
| | | | | | D83032, U78525, AF008439, X87582, |
| | | | | | AC004200, L30117, AF061795, AF151685, |
| | | | | | AC004690, AF126247, A90832, AC007390, |
| | | | | | E04233, AL137533, and AR054984. |
| HTXGF27 | 78 | 695766 | 1-1283 | 15-1297 | AI935291, AI565606, AW055263, AA827998, |
| | | | | | AA134925, R71442, W73084, W37623, |
| | | | | | AI376157, AW071733, AA760869, |
| | | | | | AW084636, AW084135, N40260, W37624, |
| | | | | | AA621956, AI261507, AI024926, AA576858, |
| | | | | | AA782442, AI753564, W73188, AA457140, |
| | | | | | AI362706, AI088401, W37568, N80584, |
| | | | | | AA100989, AI870558, AA552108, AA464487, |
| | | | | | AA577315, H99262, N42314, AA135041, |
| | | | | | AA099421, AA917378, AI955891, |
| | | | | | AW009052, AI865605, AI811602, W37443, |
| | | | | | AA506577, N28234, AI564918, W00732, |
| | | | | | H56180, AI784357, W07706, AW407317, |
| | | | | | AI571677, T64405, AI018764, AA297089, |
| | | | | | R71095, AA297614, F19530, AA628651, |
| | | | | | H56396, AA588512, T64219, AI291707, |
| | | | | | R39750, AA622681, R36668, AI564962, |
| | | | | | AA814874, AI868306, AW247018, |
| | | | | | AA082510, C00495, AL117567, and |
| | | | | | AF151851. |
| HAPQW27 | 79 | 1217191 | 1-979 | 15-993 | AA639858, AI951569, AI354569, AW264601, |
| | | | | | AW054709, AI090445, AA430536, |
| | | | | | AA629365, AA700759, AW264109, |
| | | | | | AW391923, R99213, AI367529, R99214, |
| | | | | | AA621416, AA994116, AI366194, AA535876, |
| | | | | | AI659168, AA857919, T79408, AI338674, |
| | | | | | AA453512, AI183858, N76754, AA978141, |
| | | | | | H27149, AI219725, AW015835, H45923, |
| | | | | | R48474, AI868900, H45924, AA493368, |
| | | | | | AI472888, AA478001, T79494, Z39933, |
| | | | | | F31223, H24791, AA453511, F35256, |
| | | | | | R48475, R07932, M79086, AW009601, |
| | | | | | T35085, AI969822, AA478000, AA635101, |
| | | | | | AA430495, AA769695, AA772948, |
| | | | | | AA962346, AF059202, AF078752, and |
| | | | | | AW613082. |
| HCUGR38 | 80 | 706471 | 1-332 | 15-346 | |
| HCUGN19 | 81 | 716989 | 1-584 | 15-598 | R83518, H01355, R83503, AA204689, |
| | | | | | AI990886, AI660160, H45024, AI300806, |
| | | | | | AI969915, AI927423, AI457940, AI744631, |
| | | | | | AI928256, AI380503, AI867197, AW237763, |
| | | | | | AI800708, AI588959, AI765531, AW300271, |
| | | | | | AI830241, AI762594, AA828477, AW058189, |
| | | | | | AI871379, AI740633, AW301155, AA937166, |
| | | | | | AW316942, H44971, AA804639, AA535256, |
| | | | | | AW071230, R31122, R65687, H01309, |
| | | | | | H28671, AI829069, AA767789, AA953355, |
| | | | | | AW138552, AI870155, AI092045, and |
| | | | | | AA207090. |
| HDPTW90 | 82 | 1171161 | 1-628 | 15-642 | |
| HPTGB43 | 83 | 726460 | 1-492 | 15-506 | AA573537, AI160878, AA885566, AA861893, |
| | | | | | AA433946, AA568688, AA811995, |
| | | | | | AA442766, AA838602, AW168298, |
| | | | | | AI283278, AI015935, AA782093, AI472891, |
| | | | | | AI199547, AA573777, AI085835, AI669114, |
| | | | | | AI690776, T61807, AA652483, AA086353, |
| | | | | | AW204782, AI004311, AI566973, AA501347, |
| | | | | | AI281530, AA876623, AI589871, AW138834, |
| | | | | | AW245578, AA613669, AA714315, |
| | | | | | AA813327, AA507560, N52392, AA492250, |
| | | | | | AI221056, AA446582, AI083879, AI304532, |
| | | | | | AI304454, AA531050, AA720002, AI304455, |
| | | | | | AA720021, N54353, AA418354, AI937637, |
| | | | | | AI573258, AI382182, AI557530, AI244679, |
| | | | | | AI557529, AA305352, N30214, H85048, |
| | | | | | AA918480, AA230200, AI571328, AI859175, |
| | | | | | AI264256, F21642, H65466, AI991112, |
| | | | | | H91692, C00330, T73417, N63050, H93999, |
| | | | | | AW300104, AI885837, AA134203, T71348, |
| | | | | | AI808444, N32117, AI985397, AA855127, |
| | | | | | AA431169, T55136, AA291581, Z30219, |
| | | | | | T73332, H72870, H77954, N63300, AI141454, |
| | | | | | AA293323, AA432189, AW150864, T61353, |
| | | | | | T73347, AA229346, T72864, N88648, |
| | | | | | AI251780, AA641099, AA625514, R50529, |
| | | | | | AW245568, H78357, T98646, F15963, |
| | | | | | AA430753, H72469, AA313563, H85040, |
| | | | | | AA446709, AA938645, AA522761, |
| | | | | | AF113123, and AR009500. |
| HEONO59 | 84 | 741361 | 1-848 | 15-862 | W37916, AW369323, AL138197, AA292636, |
| | | | | | AA789205, AA278688, AI077497, AI670821, |
| | | | | | AW117287, AA608906, AA382777, |
| | | | | | AA724269, AA278680, AA827227, AI160796, |
| | | | | | AA600253, AI990171, AA625768, W37874, |
| | | | | | AA421286, AA292637, AA844108, |
| | | | | | AA917528, AW316905, AA768446, and |
| | | | | | AF117210. |
| HWBBR65 | 85 | 1165264 | 1-2227 | 15-2241 | AI110760, AL040921, AL048969, AL044339, |
| | | | | | AL044340, AI608771, AL037632, AW102811, |
| | | | | | AI054414, AW157180, AW188427, |
| | | | | | AI952885, AI302688, AL048626, AW080062, |
| | | | | | AL044489, AL042905, AL042906, |
| | | | | | AA223932, AA126635, AI791227, AL119331, |
| | | | | | AI076616, AW408643, AL138265, |
| | | | | | AW243793, AI354847, AI679294, AL135377, |
| | | | | | AA134961, AI679871, AA601278, AI694178, |
| | | | | | AI732911, AW069819, AA487475, AI907046, |
| | | | | | AI457389, H57596, AI961264, AA736713, |
| | | | | | AL041013, AI871691, AI816537, AA287618, |
| | | | | | AA020873, AL138065, AL137984, AI917156, |
| | | | | | AL120343, AA456937, AL079869, |
| | | | | | AW405593, AW008089, U51704, AL120483, |
| | | | | | AI141202, AA084401, AW401509, |
| | | | | | AA634991, AA081138, AI457152, AA580560, |
| | | | | | AW372037, AI445582, N76766, AA601503, |
| | | | | | H77505, AA017377, AA831913, AL041895, |
| | | | | | AA527963, AA618412, AL038705, AI016192, |
| | | | | | N23097, AA608588, AI583978, AA706495, |
| | | | | | AA284247, W96277, AA575852, AA601230, |
| | | | | | AA584482, AL134338, AI580906, AA586907, |
| | | | | | AA608612, AA838140, AI581006, AA640277, |
| | | | | | AI798521, AA297145, AL120269, |
| | | | | | AW169057, AA984258, AI143051, |
| | | | | | AA568303, AI801141, AA834799, AI820992, |
| | | | | | AI734144, AI732128, AI732635, AA568314, |
| | | | | | AA224525, AI913324, AA489856, AI433104, |
| | | | | | N23913, AL118925, AI016704, AI612111, |
| | | | | | AA613164, AA908687, AL043095, |
| | | | | | AL046746, AL134216, AA130647, |
| | | | | | AA908857, H57595, AI823679, F28204, |
| | | | | | N27362, AI982808, AA862035, AC005409, |
| | | | | | AC010205, AC005529, AC003101, |
| | | | | | AL109952, AF207550, AC005519, AC005071, |
| | | | | | AC007226, AF109907, AC005225, AL109627, |
| | | | | | Z84469, AL139054, AC004167, AC005632, |
| | | | | | U80017, AC006449, AC005488, AC004030, |
| | | | | | AC005527, AC006241, Z98044, AC009247, |
| | | | | | AC006441, AC004999, AL022311, Z97876, |
| | | | | | AC006538, AL035420, AC020663, |
| | | | | | AC005944, AC006312, AF217403, |
| | | | | | AC004542, AL022316, AL035086, |
| | | | | | AC007686, AL031602, AL008718, AL109827, |
| | | | | | AC004491, AC005821, AF001550, AP000694, |
| | | | | | AC000025, AC002425, AC005512, |
| | | | | | AC003665, AL020997, Z83844, AC008044, |
| | | | | | AC012085, AC004821, AC004913, U78027, |
| | | | | | AC006064, AL121603, AD000092, |
| | | | | | AC005280, AC004973, AC005288, |
| | | | | | AC005778, AL109984, AC005808, AF111168, |
| | | | | | AC005696, AC000353, AC005619, |
| | | | | | AL080317, AC004929, AP000030, AC005231, |
| | | | | | AF196779, AL035587, AC006251, AL031284, |
| | | | | | AL031295, AC005666, AL133246, |
| | | | | | AC006211, AP000558, AL023575, AL049795, |
| | | | | | AC005412, AL023553, AC005911, L78810, |
| | | | | | AC005037, AL022315, AC006946, |
| | | | | | AL009181, U47924, AC006084, AL021391, |
| | | | | | AF134726, AP000557, Z83822, AC006057, |
| | | | | | AC005057, AC004150, AC004447, |
| | | | | | AL035422, AC004854, AC004033, |
| | | | | | AC004893, AF196969, AL133448, AL136295, |
| | | | | | AC004230, AC005828, Z82976, AL022238, |
| | | | | | AC005005, AL031657, AC004859, |
| | | | | | AC003982, AC004985, AP000555, |
| | | | | | AC007546, AP000116, AC007283, AP000350, |
| | | | | | AC004448, AC004991, AC005261, |
| | | | | | AC005015, AL035462, AC006255, |
| | | | | | AC004526, AC004671, U96629, AL050307, |
| | | | | | AL031587, AP000211, AP000133, L44140, |
| | | | | | AC003688, AL031666, AC005763, |
| | | | | | AC005624, Z98051, AC005088, AC005041, |
| | | | | | Z97183, AL022237, AL049780, AP000065, |
| | | | | | AC004686, AL021579, AC002477, |
| | | | | | AL109963, AL132712, AP000501, AC005500, |
| | | | | | AC016830, AL035458, AL122020, Z84480, |
| | | | | | Z97054, AL096774, AC005803, Z83840, |
| | | | | | AC003043, AL031848, AF196971, AC004783, |
| | | | | | AL031681, AC004383, AC005049, |
| | | | | | AC005274, AL031281, AL050321, AL080243, |
| | | | | | AC004966, AC005391, AC005484, |
| | | | | | AC002310, AC005914, AC007021, Z85986, |
| | | | | | AL022322, M63796, AC006597, AC006120, |
| | | | | | AC002395, U62293, AC007666, AC004675, |
| | | | | | Z95114, AC002300, AC004887, AP000503, |
| | | | | | AF088219, AL035423, AL031680, AC005730, |
| | | | | | AC006450, AC005800, AC005618, Z93023, |
| | | | | | AL121653, AF045555, AL020993, Z95152, |
| | | | | | U95739, AL031432, AF030453, AC006071, |
| | | | | | AC004139, AC005081, AC005971, |
| | | | | | AL008725, AL034379, AC004797, AL022476, |
| | | | | | AL049643, AC007421, AC002558, |
| | | | | | AC006285, AC007565, AL034420, |
| | | | | | AC004531, AC005399, AL024507, |
| | | | | | AC004234, AC002312, AB015355, |
| | | | | | AC004881, AC006468, AC005921, |
| | | | | | AC002470, AL031591, AC006487, |
| | | | | | AC002365, AC005670, D87675, Z93244, |
| | | | | | AC007384, AC005736 AC005913, Z99716, |
| | | | | | AC006121, AL133163, AC006146, |
| | | | | | AC005940, AC004975, AC004148, |
| | | | | | AC005620, and AC006480. |
| HFTCF28 | 86 | 778653 | 1-530 | 15-544 | W96302. |
| HEGAO83 | 87 | 780837 | 1-314 | 15-328 | AR064011, AC024009, AC040991, and |
| | | | | | AC040991. |
| HPIAU71 | 88 | 1125171 | 1-729 | 15-743 | |
| HYABB43 | 89 | 1126356 | 1-1224 | 15-1238 | AI052516, AI887969, AI459300, AI279457, |
| | | | | | AW008970, AA582206, AA131782, N20025, |
| | | | | | AA621643, and AC010175. |
| HHPDX35 | 90 | 1182277 | 1-2653 | 15-2667 | AI809872, AW019999, AW104416, |
| | | | | | AA442453, AI591161, AI627704, AI480372, |
| | | | | | M174542, AW379311, AA579804, |
| | | | | | AA622859, AW376415, H73145, D79894, |
| | | | | | D61710, D79938, AW263340, C16335, |
| | | | | | D63058, AA329542, R99362, H12512, |
| | | | | | AW268159, N94060, R48020, D62767, |
| | | | | | N69569, AW069883, AI683005, AW151861, |
| | | | | | AW151968, AW379305, F24300, and |
| | | | | | AI431678. |
| HHAMF38 | 91 | 1193198 | 1-2197 | 15-2211 | AW002967, AW027779, AI803049, |
| | | | | | AW194946, AW182921, AI983694, |
| | | | | | AA978351, AI658726, AI219858, AI669330, |
| | | | | | AW418951, AI984802, AA128041, AI942355, |
| | | | | | AI038656, AI697774, AI694647, T74734, |
| | | | | | AI830735, AI922255, AI658577, AW129197, |
| | | | | | M77987, AI918192, T48344, AA128086, |
| | | | | | T50347, AA970231, AA702280, AI191395, |
| | | | | | AA912726, AI570573, AW450850, AI364931, |
| | | | | | AI459038, AI224891, D45721, AA836277, |
| | | | | | AI433889, AF211943, AF187014, U13395, |
| | | | | | AF187015, AC009044, and AF212843. |
| HFIJC31 | 92 | 828148 | 1-519 | 15-533 | AA885328, N79858, and AI184184. |
| HNTRL43 | 93 | 1143390 | 1-1595 | 15-1609 | AI620476, AI198431, AI937934, AW156979, |
| | | | | | AA206763, AI457180, AI310199, AI310203, |
| | | | | | AW162701, AI571493, AI653833, AI803863, |
| | | | | | AI659993, AI202174, AA081483, AI625328, |
| | | | | | AW161809, AA084738, T33252, AI474375, |
| | | | | | AW449706, AA476436, AA595562, |
| | | | | | AI879117, R45502, AI632327, R38512, |
| | | | | | H39115, Z41406, AI420351, AA206949, |
| | | | | | Z45755, T05387, D52927, AW162666, |
| | | | | | AA476541, AW054938, AI783994, and |
| | | | | | AA928185. |
| HOFNC80 | 94 | 1193220 | 1-1880 | 15-1894 | AA837819, and AF111714. |
| HBJJX53 | 95 | 1217030 | 1-578 | 15-592 | AA477047, AW383764, AA321993, |
| | | | | | AA309810, W25768, AA465618, R50327, |
| | | | | | R24995, AA368102, W07130, AL036509, |
| | | | | | AW015964, AA356448, AW021281, |
| | | | | | AA188385, AI417948, AW020382, N58603, |
| | | | | | AA146868, AW327881, AW022474, |
| | | | | | AL037408, M253617, AW020385, |
| | | | | | AW024028, AW022377, AW250576, |
| | | | | | AW078617, AW014150, AA935403, |
| | | | | | AA568927, AA527489, AI061593, AI889745, |
| | | | | | N75635, AW328274, D30900, AA368997, |
| | | | | | AA644214, AI611444, AA938035, AA642852, |
| | | | | | AI971358, AA541570, AW440667, |
| | | | | | AA847331, AI581824, AA885549, |
| | | | | | AW023048, AA501970, AI371411, |
| | | | | | AW022117, AW019893, AI220689, |
| | | | | | AA528461, AI189988, AI748837, F15644, |
| | | | | | N21994, AA659814, N27409, N73091, |
| | | | | | AI369148, T52918, H90255, AW068298, |
| | | | | | AI271812, AI143404, F30162, AI621356, |
| | | | | | AI682399, T94204, AI468324, AA113423, |
| | | | | | AI309282, AA187792, AA157054, AI879792, |
| | | | | | N64072, AA558529, AA630443, AA317564, |
| | | | | | T46922, T46909, AA634008, AA352649, |
| | | | | | H77792, AA173921, AA316284, AA316553, |
| | | | | | AA316955, N77939, AA307553, N73723, |
| | | | | | AI701305, R53898, D51124, AA648585, |
| | | | | | AA533759, AA773206, F01306, T59924, |
| | | | | | AI191170, F26077, AA649685, AA731036, |
| | | | | | F32367, H27523, N22397, AA115852, |
| | | | | | 127636, AI751041, T59028, R53908, H02747, |
| | | | | | F24376, AW327840, AA301510, AA468983, |
| | | | | | H88026, F26670, N68119, H96065, AI090441, |
| | | | | | F34227, F31831, AI791923, T53038, |
| | | | | | AA525463, AA526678, AI792408, |
| | | | | | AW058162, N75815, F22445, D12081, |
| | | | | | W69552, T56001, D11595, F21762, D11746, |
| | | | | | H88248, F20819, F20636, AC005071, |
| | | | | | AF161080, AF161081, AC005406, and |
| | | | | | D14530. |
| HNTBF75 | 96 | 1090339 | 1-650 | 15-664 | AI659901, AF078850, U81186, and |
| | | | | | AC002069. |
| HSKIA89 | 97 | 837986 | 1-909 | 15-923 | AW204099, AA314747, AA249613, |
| | | | | | AW301249, AI261562, AA775742, |
| | | | | | AA609749, AI446434, and J02649. |
| HHAME78 | 98 | 840939 | 1-413 | 15-427 | AA430753, AW245568, AA625514, H72469, |
| | | | | | AA446709, AI885837, H95032, AI991112, |
| | | | | | AI382182, AA313563, W00555, R86214, |
| | | | | | R50625, W00611, AI589871, N78252, |
| | | | | | AA305352, H64869, AI573258, N30214, |
| | | | | | H78356, T60510, AA507560, AA613669, |
| | | | | | N56787, AA429728, AW168298, AI015935, |
| | | | | | H91789, N63300, H73548, H84670, |
| | | | | | AW245578, AI244679, N63050, N88648, |
| | | | | | T72288, AI669114, N52392, Z20777, Z30219, |
| | | | | | AA714315, AA433946, AA442766, AI808444, |
| | | | | | AA641099, AA568688, AI557529, AA813327, |
| | | | | | AI557530, AA492250, T72293, AI083879, |
| | | | | | AI221056, AI937637, AW440575, AA720021, |
| | | | | | AA446582, AA782093, AA134202, AI304532, |
| | | | | | T71510, AA418354, N40867, AI281530, |
| | | | | | AI304455, AA855127, N72798, T73399, |
| | | | | | AA573777, T73332, AA811995, T98698, |
| | | | | | AA838602, AI085835, H47484, AA652483, |
| | | | | | AI304454, AA720002, AA885566, AA531050, |
| | | | | | AA573537, AA918480, AA861893, AI199547, |
| | | | | | AI160878, AA876623, AI283278, AI690776, |
| | | | | | AI566973, AI472891, AA230291, H65466, |
| | | | | | T61353, H84633, N54353, T61807, F21642, |
| | | | | | AI571328, N76319, H91692, T71348, |
| | | | | | AF113123, AR009500, and A74991. |
| HHFCI36 | 99 | 844285 | 1-337 | 15-351 | AA297665, AA298879, AL049946, |
| | | | | | AC004616, AC073582, AC073582, |
| | | | | | AC011307, AC011307, AC004616, |
| | | | | | AC011302, AC011302, and AC011302. |
| HDPXL24 | 100 | 1182266 | 1-3115 | 15-3129 | AA486735, AA421808, N53555, AI922158, |
| | | | | | AW052105, AI032935, AI031641, AA429482, |
| | | | | | AA478009, AI375186, AI804201, AI361364, |
| | | | | | AI864580, AA937131, AI347674, AI936668, |
| | | | | | AI818995, AA977133, AI192230, H22126, |
| | | | | | AA009894, AA402775, AI695593, AI695105, |
| | | | | | H12820, AA402210, AA366176, AW170283, |
| | | | | | AA486734, R48413, H39702, AI371102, |
| | | | | | AA009785, AI301705, AA443494, AA478164, |
| | | | | | N72513, and AI906819. |
| HACCH94 | 101 | 847143 | 1-1399 | 15-1413 | AI093369, AW292321, AA972431, N40174, |
| | | | | | AA746376, AA130392, AA286750, |
| | | | | | AA287684, R71586, R71568, R71587, |
| | | | | | H03136, H03946, R71567, AI471079, H97311, |
| | | | | | AA365025, AF039686, AF118670, AR034800, |
| | | | | | AF081916, ALI61458, and AL161458. |
| HTEOF80 | 102 | 1181204 | 1-1706 | 15-1720 | R99817, AF186084, and AL117610. |
| HTEED80 | 103 | 849075 | 1-1299 | 15-1313 | W87655, AA465429, AA203572, AI479983, |
| | | | | | AI540082, AA192438, AA836236, AA465358, |
| | | | | | AA829419, AA507269, AW290970, |
| | | | | | AI796504, AA904433, AA368409, AA688079, |
| | | | | | AW189971, AA601527, AA393948, F36549, |
| | | | | | W87656, AA320120, AI862710, F30605, |
| | | | | | AA196706, and AJ242978. |
| HDPND85 | 104 | 852628 | 1-841 | 15-855 | W58472, W58514, T49180, AI356759, |
| | | | | | AW351512, AC003042, AC003042, and |
| | | | | | AC003042. |
| HKABI68 | 105 | 856590 | 1-548 | 15-562 | AW249217, AA534535, AA115832, |
| | | | | | AA315785, AA429231, T08490, AW404684, |
| | | | | | Z42191, AA336855, AC007606, and |
| | | | | | AC007606. |
| HWHPO29 | 106 | 857383 | 1-657 | 15-671 | AL049779, and AL049779. |
| H7TBC95 | 107 | 865922 | 1-692 | 15-706 | |
| HBGDA14 | 108 | 866258 | 1-879 | 15-893 | AC024580, and AC074220. |
| HSLHT48 | 109 | 1207945 | 1-1652 | 15-1666 | AI526125. |
| HE2KL28 | 110 | 1127459 | 1-864 | 15-878 | AI274972, AI015495, F34649, AA746678, |
| | | | | | C04411, and Z30107. |
| HCFND04 | 111 | 1156311 | 1-1794 | 15-1808 | AI091533, AI276640, AI802181, AA385823, |
| | | | | | AI613038, AI802542, AI924686, AL040243, |
| | | | | | AW071417, AL042628, AW103628, |
| | | | | | AI537677, AA225339, AW088899, AI932794, |
| | | | | | AI567582, AI570807, AI270183, F27788, |
| | | | | | AI288285, AW149925, AI824576, AI923989, |
| | | | | | AI499285, AI680498, AI917252, AL121286, |
| | | | | | AW150457, AI221035, AI345416, AI345612, |
| | | | | | M932638, AI678357, AI345415, AW160916, |
| | | | | | AW268122, AI440239, AI610362, AI866770, |
| | | | | | AI890223, AI929108, AI637748, AW129230, |
| | | | | | AI431909, M952862, AI491852, AI358701, |
| | | | | | AI274745, AI564259, AI812015, AW079572, |
| | | | | | AW020561, AL046942, AI963846, AI934011, |
| | | | | | AL042745, AI335426, AI348777, AL041150, |
| | | | | | AW263823, AI636588, AI648502, AL045266, |
| | | | | | AI874166, AI280732, AI811912, AI184903, |
| | | | | | AI627988, AA833760, AI612913, AI956080, |
| | | | | | AI554821, AW168485, AW073697, |
| | | | | | AI623682, AW268302, AL048871, AI620089, |
| | | | | | AW072719, AI500588, AL038445, AI802240, |
| | | | | | AI500061, AI670009, AI284484, AI207572, |
| | | | | | AW087938, AI633125, AI334445, AL039086, |
| | | | | | AI254731, AI475371, AI473799, AI624084, |
| | | | | | AI890907, AW151847, AL079963, AI798456, |
| | | | | | AI468872, AW084219, AL039276, AL048323, |
| | | | | | AI698391, AL037582, AL037602, AI591407, |
| | | | | | AL048340, AI950892, AA427700, AI673363, |
| | | | | | AI554344, AI560184, AL036548, AI916419, |
| | | | | | AI344928, AI758437, AL043326, AI537617, |
| | | | | | AI862135, AL036638, AL110306, AW083573, |
| | | | | | AW083750, AI281867, AL119399, |
| | | | | | AW020164, AI280661, AL036541, |
| | | | | | AW262565, AI826225, C16221, AI811785, |
| | | | | | AL079740, AI927755, Z99428, AW151136, |
| | | | | | AW105431, AI865906, AW029611, |
| | | | | | AA806720, AW079409, AI491775, AI689420, |
| | | | | | AI571439, AI612759, AI969655, AI241923, |
| | | | | | AW162189, AW089310, AW079075, |
| | | | | | AI497733, AI473536, AI559296, AW170635, |
| | | | | | AI921176, AI635016, AW150762, |
| | | | | | AW089258, AI611738, AI619502, AI569616, |
| | | | | | AI677796, AI306613, AI889133, AI352497, |
| | | | | | AI433976, AI873604, AI922901, AI349967, |
| | | | | | AI608676, AW301513, AL045997, |
| | | | | | AW198090, AI365256, AW026882, |
| | | | | | AI537261, AI539771, AI567351, AW163834, |
| | | | | | AI608936, AI633419, AW167918, AI648509, |
| | | | | | AI433157, AI702073, AI269862, AI758512, |
| | | | | | AW150225, AI921746, AW268220, |
| | | | | | AA640779, AA287231, AL119863, AI250663, |
| | | | | | AI334450, AI340603, AI866162, AI638798, |
| | | | | | AW079336, AI679990, AI249877, AI686817, |
| | | | | | AI270706, AI699865, AA572758, AI860694, |
| | | | | | AI285586, AI251221, AI270429, AW129106, |
| | | | | | AW073677, AI915291, AI587606, |
| | | | | | AW152182, AI879064, AI345477, AI955866, |
| | | | | | AI520809, AI590118, AI829327, AI687295, |
| | | | | | AI539847, AW118518, AI538829, |
| | | | | | AW059713, AI580436, AI310575, AI610645, |
| | | | | | AW193236, AWI6I156, R81679, AI950664, |
| | | | | | AI889953, AW162194, AW105601, |
| | | | | | AI340533, AI571909, AI627880, AI922315, |
| | | | | | AI270055, AI824746, AI682743, AI923370, |
| | | | | | AW163464, AI275640, AW151729, |
| | | | | | AI624693, AI886124, AW051258, |
| | | | | | AW169604, AC007068, AL122098, |
| | | | | | AF026816, AF158248, AF118094, AF113690, |
| | | | | | I89947, AF118070, A77033, A77035, |
| | | | | | AL117460, AL133075, AL122110, I33392, |
| | | | | | AL137550, Z72491, I48978, Z82022, |
| | | | | | AL117585, AL117457, A03736, AL110221, |
| | | | | | Y16645, AL049283, Y11254, AR011880, |
| | | | | | A08913, AL050116, A08916, AL133080, |
| | | | | | AF113677, AR059958, AL117435, A65341, |
| | | | | | AL050172, S68736, AL133014, AF057300, |
| | | | | | AF057299, AL110196, A08910, I89931, |
| | | | | | A08909, AL049382, AL137271, AL050277, |
| | | | | | AF090903, AL133016, I49625, AF067728, |
| | | | | | AL050024, AF11I851, L31396, AL096744, |
| | | | | | L31397, I48979, A 122050, E02349, |
| | | | | | AF078844, AF091084, X82434, U80742, |
| | | | | | AF106862, AF113694, AL137557, AF125948, |
| | | | | | X72889, Y11587, AL137533, AL137463, |
| | | | | | AR038969, AL133104, AJ242859, AF017152, |
| | | | | | AF090900, AF061943, AL133067, AF017437, |
| | | | | | AL049452, AL049314, AF185576, AL122093, |
| | | | | | I26207, AJ012755, AF104032, AB019565, |
| | | | | | AJ000937, AL137459, AL050108, A08912, |
| | | | | | S61953, AL110280, AF090934, AL080159, |
| | | | | | AL137560, AF090901, X98834, AL049466, |
| | | | | | E03348, AF113689, 166342, AF177401, |
| | | | | | E04233, AF087943, S78214, X84990, I00734, |
| | | | | | AR000496, U39656, X70685, AL137538, |
| | | | | | AF113013, E00617, E00717, E00778, |
| | | | | | AL050393, X93495, U72620, AL122121, |
| | | | | | U49908, AR038854, AF113699, I42402, |
| | | | | | U00763, AF153205, U96683, U78525, |
| | | | | | AL133560, AL080124, U42766, AL137521, |
| | | | | | AL137476, AL122123, AF003737, AF097996, |
| | | | | | AF183393, AJ238278, AL133113, AL050138, |
| | | | | | X96540, AF081197, A58524, A58523, |
| | | | | | U67958, U35846, AF1I1112, AL133557, |
| | | | | | AF090896, AF113019, AF090943, AF079763, |
| | | | | | AL049464, A93350, AF026124, Y14314, |
| | | | | | AL050149, E02221, AF061573, AL080074, |
| | | | | | AL049430, AL137648, AF113691, A07647, |
| | | | | | AL050146, AF146568, AL137556, I03321, |
| | | | | | AL133640, M30514, E07108, AF125949, |
| | | | | | AF113676, AL110225, AL117394, A12297, |
| | | | | | AL133565, AL133606, X63574, U91329, |
| | | | | | AL080060, U58996, AL137526, AL117583, |
| | | | | | AL110197, E15569, AF162270, AL137527, |
| | | | | | AL133072, X65873, AF079765, AF119337, |
| | | | | | A90832, AL049938, AL080127, AL117440, |
| | | | | | Y09972, AL133568, E12747, AL122049, |
| | | | | | AF118064, I09360, AL133093, AL133098, |
| | | | | | A45787, U68387, AL133077, AL080137, |
| | | | | | AF081195, U88966, E08263, E08264, E07361, |
| | | | | | A93016, AL049300, AF210052, AB007812, |
| | | | | | AL122118, AL137283, AF111849, E08631, |
| | | | | | AL137480, X87582, E05822, AF132676, |
| | | | | | AF061981, AF061836, L30117, AL117432, |
| | | | | | Y07905, L19437, AF032666, AR020905, |
| | | | | | AL137705, AJ006417, AF008439, X53587, |
| | | | | | AL133665, AL023657, AL050092, AL137294, |
| | | | | | AF100931, E06743, AL137478, AF051325, |
| | | | | | AL137488, AL137292, AF067790, AF126247, |
| | | | | | X81464, and AL133081. |
| HLDBM06 | 112 | 1200004 | 1-1415 | 15-1429 | AW385660, AA809265, AA829492, F00820, |
| | | | | | AL135576, F08230, AA312559, AW021627, |
| | | | | | AI287475, N22037, AI366993, AA598551, |
| | | | | | AA588001, AA363353, AI800168, AI908093, |
| | | | | | AI049508, AA730422, H72530, AI207465, |
| | | | | | AW303008, AW150077, AC005279, |
| | | | | | AL034420, AC003035, AP000511, AL031848, |
| | | | | | AL023575, U47924, AC004087, AC004848, |
| | | | | | AC007314, AL022318, AF003626, AC003049, |
| | | | | | AL021578, AL031657, AC004638, |
| | | | | | AC005753, AC004857, AC007546, U62631, |
| | | | | | AF053356, AC005088, AL135744, AL034343, |
| | | | | | AC005725, AC006538, AL133163, |
| | | | | | AL133448, Z70280, AP000130, AL049776, |
| | | | | | AC002367, AC005520, AL035106, |
| | | | | | AC005920, AP000348, D87675, AL022727, |
| | | | | | AL031846, AL137100, AC004231, AP000237, |
| | | | | | AC009178, U52112, AC005562, AC002072, |
| | | | | | AC006115, AC006466, AC002538, Z81365, |
| | | | | | AC007057, AC005347, AC004797, |
| | | | | | AF030453, AL021408, AC002996, AF107258, |
| | | | | | AL035045, AC007688, AL009181, |
| | | | | | AC005015, AC006948, AC016026, |
| | | | | | AC005071, AC007030, AL049869, |
| | | | | | AC005832, AC005184, AP000208, |
| | | | | | AC004167, AC007011, AC004790, |
| | | | | | AC002300, AC006581, AL121754, |
| | | | | | AC004832, AP000252, Z82189, AL008718, |
| | | | | | AC006120, AC006531, AC0052017, |
| | | | | | AC006480, AC005409, AC000025, U95740, |
| | | | | | AC004985, AP000142, AL049569, AL109809, |
| | | | | | AL023653, AL031681, AL096791, AL034549, |
| | | | | | AC000041, AL031737, Z82214, AC004813, |
| | | | | | AC002461, AC005091, AL034548, |
| | | | | | AL022328, AL009179, AB003151, AL121595, |
| | | | | | AP000134, AP000212, and AC004032. |
| HDPMT22 | 113 | 1216488 | 1-2012 | 15-2026 | AA203281, AI623801, AI016523, AI673515, |
| | | | | | AA838021, AI799476, AI832581, AI590686, |
| | | | | | AI921469, AI270295, AI673256, AW085786, |
| | | | | | AA603709, AI345677, AI561356, AI573026 |
| | | | | | AI357599, AW151785, AI174394, |
| | | | | | AW117903, AW089006, AW189415, |
| | | | | | AI446373, AI520702, AW263569, AI470284, |
| | | | | | AI284020, AI648567, AI826415, AW009624, |
| | | | | | AW084097, AW182790, AI620093, |
| | | | | | AI860697, AW268261, AI873644, |
| | | | | | AW081255, AI862144, AL037030, AI365256, |
| | | | | | AI554343, AW058233, AI873638, AI648502, |
| | | | | | AI475267, AW088899, AI648408, AI250856, |
| | | | | | AI570966, AI921254, AW193467, AI636619, |
| | | | | | AI886594, AI874151, AI434242, AI933785, |
| | | | | | AI540606, AI282967, AI249877, AW409775, |
| | | | | | AI452556, AI539153, AI885989, AA464646, |
| | | | | | AI491783, AI859464, AI472536, AI636467, |
| | | | | | AI161278, AI799199, AW191844, AI582912, |
| | | | | | AW089179, AI609360, AW029271, |
| | | | | | AI589428, AI677824, AI677797, AI144116, |
| | | | | | AI866082, AI470293, AI345735, AI539781, |
| | | | | | AI963216, AI539707, AL036980, AW082588, |
| | | | | | AI609181, AI886532, AW075207, AI362637, |
| | | | | | AI343037, AI095113, AW268072, |
| | | | | | AW170663, AI281757, AI538342, |
| | | | | | AW129080, AI701975, AI345114, AI307210, |
| | | | | | AW168373, AA761557, AI313320, AI470714, |
| | | | | | AI553645, AI313352, AI307503, AI471227, |
| | | | | | AI307736, AI873704, AI349814, AI334893, |
| | | | | | AW082532, AI689614, AI349266, AI334452, |
| | | | | | AI349787, AI345370, AW090451, AI312146, |
| | | | | | AI312339, AI309431, AI340537, AI345745, |
| | | | | | AW169148, AI348854, AI345258, AI345253, |
| | | | | | AW081311, AI340511, AI307459, AI860783, |
| | | | | | AI269636, AW022494, AL036772, AL036396, |
| | | | | | AI311604, AI886055, AW021373, AI824748, |
| | | | | | AI271234, AI933992, AI343131, AI312271, |
| | | | | | AI349269, AI825956, AI888621, AI310945, |
| | | | | | AW189424, AI696819, AW193203, |
| | | | | | AA070889, AL036652, AI650787, |
| | | | | | AW082594, AI282376, AI818578, AI889148, |
| | | | | | AW193026, AI345737, AW088805, |
| | | | | | AW074274, AI453413, AI613453, AI345736, |
| | | | | | AI669639, AI096613, AI282651, AI349933, |
| | | | | | AI345608, AI802372, AI471282, AI752007, |
| | | | | | AI636197, AI349598, AI251830, AI569309, |
| | | | | | AA848053, AI469516, AI912866, AW168384, |
| | | | | | AI910464, AA806719, AI554484, AI539771, |
| | | | | | AI929108, AI866608, AW085799, AI436429, |
| | | | | | AW082600, AI582871, AI473451, AI963387, |
| | | | | | AI863047, AI805688, AI537677, AI283914, |
| | | | | | AI696611, AI336662, AI249946, AI890507, |
| | | | | | AI345471, AI383919, AI805638, AI366922, |
| | | | | | AW079334, AI366549, AI636719, AI382670, |
| | | | | | AI832245, AI446405, AW130430, AI282031, |
| | | | | | AI582954, AI805769, AL046463, AW072930, |
| | | | | | AW082623, AW189777, AW301300, |
| | | | | | AI560545, AI611743, AI344938, AW088560, |
| | | | | | AW166865, AW083804, AA830821, N98606, |
| | | | | | AI951222, AI696626, AI284509, AI811863, |
| | | | | | AI244380, AI568765, AI589993, AW149876, |
| | | | | | AW059713, AI652028, AW151889, |
| | | | | | AW105455, AI917963, AI799195, AI955945, |
| | | | | | AI830187, AW151625, AI918554, AA587590, |
| | | | | | AI343582, AI307507, AF015958, U00686, |
| | | | | | AF040751, AF000145, A18777, AL050138, |
| | | | | | AL133637, AL133624, AL137523, I48978, |
| | | | | | I41145, U96683, AF169154, S77771, U42031, |
| | | | | | A52563, I89947, AF036941, U90884, A08913, |
| | | | | | A45787, I89931, AF183393, A08912, |
| | | | | | AL117629, AL137294, A08910, I49625, |
| | | | | | AL080086, A08909, AF081197, AF081195, |
| | | | | | AR038854, A08908, X62580, AL133645, |
| | | | | | S76508, E15582, I89934, AB019565, |
| | | | | | AL133104, Y16258, Y16257, E02756, |
| | | | | | Y16256, I26207, AF113691, AF022813, |
| | | | | | AL080158, AL080127, AF113676, X81464, |
| | | | | | AF003737, U57715, AJ242859, X84990, |
| | | | | | AF030513, AL122111, AL049460, Y11587, |
| | | | | | AF107847, AF094480, Y14314, E08631, |
| | | | | | U77594, AJ006417, AF182215, AC002467, |
| | | | | | A08907, A08916, AF113694, U75370, |
| | | | | | AF017790, AF061943, U80742, AL080137, |
| | | | | | AL133619, AL133081, AF159615, AR059958, |
| | | | | | AL117585, AF061795, AL137712, AF151685, |
| | | | | | AL137547, AF016271, AL137550, U72620, |
| | | | | | AL122123, AF113689, AL122050, AL133640, |
| | | | | | AL122106, AF120268, X92070, I09499, |
| | | | | | AL133568, AL137527, AJ012755, M92439, |
| | | | | | AF205861, I89944, AL137463, I46765, |
| | | | | | L19437, X96540, AF151109, AL050155, |
| | | | | | A08911, I00734, D55641, AF111112, |
| | | | | | AR068751, E03348, L13297, A65340, |
| | | | | | X87582, E05822, AF215669, E02253, E03349, |
| | | | | | L40363, X80340, AF061573, AL137574, |
| | | | | | E07108, AR059883, E00617, E00717, E00778, |
| | | | | | AJ003118, AL133014, AL137705, X65873, |
| | | | | | AF057300, AF008439, AF057299, D83989, |
| | | | | | A18788, AL137300, U75932, AF012536, |
| | | | | | U92068, AIF065135, Z72491, E01812, |
| | | | | | AL137554, AF090896, AI2297, X57961, |
| | | | | | U91329, AL049465, AC004227, AF162270, |
| | | | | | E02152, AF091084, AL137429, AF110329, |
| | | | | | AL133067, AL137557, AL133093, AL137271, |
| | | | | | AB025103, X52128, AL137665, U68233, |
| | | | | | I92592, S68736, U87620, S69510, AF158248, |
| | | | | | AL122118, I29004, S61953, AL080060, |
| | | | | | AF114818, AL122049, AF118064, AF118070, |
| | | | | | AL137560, AF115392, AF111851, AL110296, |
| | | | | | L30117, AL133098, AL117460, AL133557, |
| | | | | | AB007812, AL133075, AL117435, AL122045, |
| | | | | | AF199027, AF180525, U72621, AL133113, |
| | | | | | X93495, AL133049, AL137476, Y08769, |
| | | | | | AF026816, AF031147, U00763, S75997, |
| | | | | | AF104032, AL137556, I48979, AR000496, |
| | | | | | AF132676, U39656, AL080154, AF061836, |
| | | | | | AF192557, E01314, AL133016, X72387, |
| | | | | | AL110225, AL110222, AL137548, AF113013, |
| | | | | | Y10080, A57389, AL137526, U49434, |
| | | | | | AL049382, AR038969, AL117626, I42402, |
| | | | | | AL137538, AL122098, I66342, A90832, |
| | | | | | AL117440, AL137273, AL133072, I68732, |
| | | | | | AF078844, I09360, AF067728, X98834, |
| | | | | | M30514, AL137648, AF017152, AL137256, |
| | | | | | AF125949, AL133077, AL050146, AL137660, |
| | | | | | AL117432, AF102578, and A93016. |
| HDPRN38 | 114 | 883658 | 1-811 | 15-825 | AA232176, AA232159, H84466, AA332911, |
| | | | | | and AI765848. |
| HETKH30 | 115 | 884009 | 1-925 | 15-939 | AA436699, AA442502, H25167, AA306355, |
| | | | | | H11845, and AA584520. |
| HPIBQ37 | 116 | 884289 | 1-411 | 15-425 | AA101561, W76302, C17760, AA227408, |
| | | | | | AA215609, AA101519, AA626769, |
| | | | | | AA359412, T73746, AI927392, AF111713, |
| | | | | | A91701, A91699, AF207907, AF172398, |
| | | | | | AF154005, and AB017568. |
| HE8DY76 | 117 | 1136114 | 1-2263 | 15-2277 | AW341661, AA927475, AI127041, AI288214, |
| | | | | | AA464813, AA431900, AA234267, AI540222, |
| | | | | | AA993059, AA255475, AI698915, AA292658, |
| | | | | | H89282, AA827655, AI685041, AI038167, |
| | | | | | H89283, AA256881, AA236364, and |
| | | | | | AF087980. |
| HSTBK14 | 118 | 887715 | 1-380 | 15-394 | AA380041. |
| HE9RE21 | 119 | 1175067 | 1-1594 | 15-1608 | AI589113, AL120391, AA224260, AA326268, |
| | | | | | R83178, AW136392, T78371, AA317066, |
| | | | | | AW410844, AW265468, AA533660, |
| | | | | | AA601376, AL121039, AI702049, AI572680, |
| | | | | | AW419201, AI744963, AW162314, |
| | | | | | AI609992, AI433952, AW148821, AI064968, |
| | | | | | AI744890, AL044966, AW072963, AL133861, |
| | | | | | AI242236, AW162332, AA315052, N99245, |
| | | | | | AW192930, AW272619, AI439525, |
| | | | | | AL138262, AA610644, M77888, AI445699, |
| | | | | | AI285651, AW162762, AA525818, AI567676, |
| | | | | | AA362670, AI734076, AA425283, |
| | | | | | AW057760, AA584360, AA779599, |
| | | | | | AA112864, AA640305, AW148964, |
| | | | | | AA507623, AA524604, AA493464, AI734075, |
| | | | | | AA676462, AW028376, AI052366, AI150934, |
| | | | | | R92703, AI538404, AI133355, AA579082, |
| | | | | | AA502450, AW020094, AA199578, |
| | | | | | AA657392, AA618132, AL133216, |
| | | | | | AF098786, AF162762, AL049830, AL009181, |
| | | | | | AC004673, AC002072, AC005069, |
| | | | | | AC000353, Z93928, AL031585, AL139054, |
| | | | | | AC005726, AC004915, AC004453, |
| | | | | | AL021918, AC007207, AL121593, U91325, |
| | | | | | U95743, AL035588, AB023054, AC005520, |
| | | | | | AL009172, AC004901, AL024498, AP000036, |
| | | | | | AL034423, Z82201, AC007968, Z92844, |
| | | | | | AC005696, AC007567, AL049759, |
| | | | | | AL049869, AC007539, AC004526, |
| | | | | | AC006213, AL121653, U95738, AE000661, |
| | | | | | AL109627, AL117258, AL022345, AL133162, |
| | | | | | AC006017, AL022165, AC005828, AF042091, |
| | | | | | AC012384, AC006080, AC004944, |
| | | | | | AC006208, AC007262, AF207550, AL121754, |
| | | | | | AF186194. AL031432, AC006141, AC003041, |
| | | | | | AC004125, AL034402, AL021391, |
| | | | | | AC005138, AC004253, U91321, AC004206, |
| | | | | | AL020991, AC006948, AC004659, AP000099, |
| | | | | | AL021877, AC002452, AC008044, |
| | | | | | AL021392, AL050308, AL035420, AC002040, |
| | | | | | AC005066, AP000514, AL031575, AC004966, |
| | | | | | AP000260, AC003024, AC007151, AL096775, |
| | | | | | AC004048, AL031665, and U91327. |
| HKACI15 | 120 | 892363 | 1-1798 | 15-1812 | AI241578, AI955238, AI312113, AW338261, |
| | | | | | AI979207, AI925871, AI333843, AW009598, |
| | | | | | AA741250, T86963, AI590808, AW190875, |
| | | | | | AA244018, N20044, AA101562, AA149993, |
| | | | | | AW192453, AA152150, N28398, AA483522, |
| | | | | | T40695, AI093487, AA224590, AI263270, |
| | | | | | AA244075, R72982, AA101561, T87045, |
| | | | | | AI193265, R01692, AI469580, AI632044, |
| | | | | | T84017, W76302, AI002582, R28222, |
| | | | | | R02633, AA101520, AI864718, T39606, |
| | | | | | AA304161, AA702259, AI608881, R27969, |
| | | | | | C75490, T39607, T84016, C75621, |
| | | | | | AA861308, AA890390, AA486163, |
| | | | | | AA486100, AA513370, AA404390, |
| | | | | | AA227408, AA641435, T73746, AI687737, |
| | | | | | AA215609, AI890283, AA642887, F31670, |
| | | | | | AA101519, AI799264, C17760, H57108, |
| | | | | | AA768079, AW085811, AI304788, AI935684, |
| | | | | | AI934664, AI815425, AW339937, |
| | | | | | AW277240, AF207907, AF111713, |
| | | | | | AF154005, AF172398, A91699, A91701, |
| | | | | | AF111714, AC005527, AC005529, |
| | | | | | AC002073, AC005519, AF207550, L81576, |
| | | | | | AC008498, AL035445, AL031311, |
| | | | | | AC005914, U63721, AC007421, AP000692, |
| | | | | | AC005358, AC005730, AJ246003, Z95116, |
| | | | | | AL031681, AF109907, AL020997, AC005696, |
| | | | | | AC000353, AC007637, AC004913, |
| | | | | | AL139054, AC002310, AC002991, |
| | | | | | AC004953, AL049795, AC005412, |
| | | | | | AC000025, AC007263, AC005575, |
| | | | | | AC002036, AC007390, AL121658, |
| | | | | | AC007536, Z68756, AP000512, AL109963, |
| | | | | | AC003086, and AF015416. |
| HRDBE43 | 121 | 894862 | 1-1868 | 15-1882 | AI160324, AA420500, AW263972, AI206613, |
| | | | | | AI417744, AI953056, AA778217, AI863306, |
| | | | | | AI804393, AI432712, AI587218, AI218649, |
| | | | | | AI339726, AA780366, AI825578, H70209, |
| | | | | | AA470738, AI669249, H70546, AI611674, |
| | | | | | AI792038, R08140, T82124, AI791228, |
| | | | | | AI820643, AA847657, AI342131, AI342141, |
| | | | | | AA989292, AI631664, AI697858, AI697880, |
| | | | | | AI278251, and R84867. |
| HSSKD85 | 122 | 908141 | 1-1136 | 15-1150 | AW024960, AI479960, AI052585, AI139986. |
| | | | | | AA135576, AW137104, AW205456, N30762, |
| | | | | | AI631818, AI187156, AA830014, AI452434, |
| | | | | | AA634216, AW088488, AA398256, |
| | | | | | M859053, AI088449, AI159823, AA564062, |
| | | | | | AI494095, AA158516, AI311717, AA811798, |
| | | | | | AA226160, AI873741, N25872, AA146624, |
| | | | | | AA761003, AA190958, AI066392, AA535733, |
| | | | | | AI278434, W92242, AA225625, N40580, |
| | | | | | H94758, AI382438, AI796467, W92243, |
| | | | | | R59937, H94384, H94363, AI969940, |
| | | | | | W70120, AW338143, W99328, AA143555, |
| | | | | | AA399431, AA190865, N45043, AI718153, |
| | | | | | AI245054, AI906964, AI760352, AA135514, |
| | | | | | AA653523, AI708811, AA034276, W69970, |
| | | | | | AA156400, M93661, D32210, and U57368. |
| HFOXL77 | 123 | 910698 | 1-602 | 15-616 | W22070, AB033063, and AR065869. |
| HBXCZ29 | 124 | 910842 | 1-823 | 15-837 | |
| HNTMB90 | 125 | 910934 | 1-718 | 15-732 | Z99396, AL038837, AL037051, AL036725, |
| | | | | | AA631969, AL039074, AW392670, |
| | | | | | AL036418, AL039085, AL039564, AL036858, |
| | | | | | AL039156, AL039108, AL038509, AL039109, |
| | | | | | AL039128, AL036924, AL037094, AL039659, |
| | | | | | AL038531, AL036196, AL039625, AL039648, |
| | | | | | AL045337, AL036767, AL119497, AL037082, |
| | | | | | AL037526, AL036190, AL038447, AL119483, |
| | | | | | AL037639, AW372827, AL039678, |
| | | | | | AW363220, AL039629, AW384394, |
| | | | | | AL119457, AL039423, AL036238, AL039150, |
| | | | | | AL119319, AL040992, AL119324, AL042909, |
| | | | | | U46350, AL038520, AL119484, AL119391, |
| | | | | | AL037077, AL119443, AL119522, U46351, |
| | | | | | AL119355, AL119363, AL037726, U46341, |
| | | | | | U46347, U46349, AL134533, AL039410, |
| | | | | | AL038851, AL119341, AL134531, AL119335, |
| | | | | | AL119418, AL119396, AL039386, AL036998, |
| | | | | | AL036733, AL119496, AL037615, AL119439, |
| | | | | | AL036268, AL037085, AL119401, AL119444, |
| | | | | | AL037205, AL037027, AL037178, AL045353, |
| | | | | | U46346, AL036679, AL042614, AL036765, |
| | | | | | AL042965, AL042975, AL134528, AL134538, |
| | | | | | AL042984, AL036191, AL119399, AL134920, |
| | | | | | AL042544, U46345, AL036719, AL043003, |
| | | | | | AL043019, AL042542, AL042551, AL042450, |
| | | | | | AL043029, ALI341542, AL134532, AL037021, |
| | | | | | AL037054, AL036836, AL036158, AL119464, |
| | | | | | AL036774, AL036886, AL036999, AL036964, |
| | | | | | AR066494, AR060234, AR023813, |
| | | | | | AR064707, A81671, AR069079, AB026436, |
| | | | | | AR0541110, and AR064706. |
| HMKCH92 | 126 | 910936 | 1-789 | 15-803 | T78768, R13299, R14933, AB003592, |
| | | | | | D87248, AC018833, AC034192, AC026206, |
| | | | | | AC026206, AC022381, and AC022381. |
| HTELV86 | 127 | 910946 | 1-1086 | 15-1100 | AI272244, AA382531, AI809639, U35371, |
| | | | | | and X99043. |
| HNTAF23 | 128 | 910947 | 1-239 | 15-253 | AW392670, AL119355, AW372827, U46341, |
| | | | | | AL119483, AL119319, U46349, AL119457, |
| | | | | | AL119324, AW384394, AL119497, |
| | | | | | AW363220, Z99396, AL134920, AL134524, |
| | | | | | AL119484, AL119363, AL119391, U46350, |
| | | | | | U46347, U46351, AL119443, AL119444, |
| | | | | | AI142137, AL119341, AL134538, AL119439, |
| | | | | | AL119522, AL119396, U46346, AL043029, |
| | | | | | AL037205, AL134531, AL119335, AL042614, |
| | | | | | AL119399, AI142139, AL119496, AL134533, |
| | | | | | AL119418, U46345, AL043011, AL042984, |
| | | | | | AL043019, AL042544, AL042896, AL043033, |
| | | | | | AL042965, AL042975, AL042450, AL042542, |
| | | | | | AL043003, AL119464, AL042551, AB026436, |
| | | | | | A81671, AR060234, AR054110, AR066494, |
| | | | | | AR069079, and AR043113. |
| HDDAF49 | 129 | 1127877 | 1-893 | 15-907 | AL133047. |
| HHEZT58 | 130 | 911416 | 1-544 | 15-558 | H29349, AI989604, AI023283, and |
| | | | | | AL049552. |
| HETEY43 | 131 | 1227646 | 1-2325 | 15-2339 | AA416825, AA004273, AI694002, AA994178, |
| | | | | | AW028389, AW005600, AI028762, |
| | | | | | AW361145, AW005609, AA416694, |
| | | | | | AA872644, AA159854, AA398414, AI588937, |
| | | | | | N45311, AW074429, AA812539, W16858, |
| | | | | | AI362984, AW385193, AI168838, AI378368, |
| | | | | | AI347827, AI905632, N91133, W20422, |
| | | | | | AA158737, N50437, AW371259, R17090, |
| | | | | | AA989438, AA641286, AA007287, Z43294, |
| | | | | | AI867088, AA161059, R07447, AA888152, |
| | | | | | AA938635, AA552691, AA055511, N54761, |
| | | | | | AI540615, AA403066, AA515605, AA856599, |
| | | | | | AA055512, AA161002, H15805, D20199, |
| | | | | | R17091, R62201, AA977374, AA677972, |
| | | | | | AI302293, R07448, F07754, F02724, W31874, |
| | | | | | Z40838, R64586, AW081002, AI005604, |
| | | | | | AA382937, AI660382, AA854985, AI273668, |
| | | | | | AA978325, AI298846, AI190563, AI352446, |
| | | | | | AI016243, AI217130, AI566458, AI308866, |
| | | | | | AI138836, AA235342, AI468643, AA258375, |
| | | | | | N90300, AI266090, AI572259, AA039698, |
| | | | | | N74691, AI198802, AA706102, AA815326, |
| | | | | | AA729427, AA554340, AI082197, H97816, |
| | | | | | AI305205, AA534840, AA722577, AI094340, |
| | | | | | AI240390, AW084656, AW297272, |
| | | | | | AI680152, AA936948, AA890213, AA828297, |
| | | | | | N92285, AI277971, AA828311, AI689585, |
| | | | | | AI122587, AA642550, AI369540, AI220817, |
| | | | | | AA436858, AA992749, N69914, AA749389, |
| | | | | | AA406268, R16087, AA401493, AI378158, |
| | | | | | AA843464, AI041701, AI017781, AI033835, |
| | | | | | AI918112, AA885965, H96077, AA683524, |
| | | | | | AI090938, H41782, AL133017, AR031994, |
| | | | | | and L40410. |
| HWHQR10 | 132 | 1137770 | 1-1113 | 15-1127 | AW003215, AI989557, AI653400, AA176800, |
| | | | | | AI283706, AI637491, AA581386, and |
| | | | | | AC004235. |
| HAUAI17 | 133 | 921674 | 1-1010 | 15-1024 | AI742586, AI823636, AI738645, AI570505, |
| | | | | | AA994212, AW166260, AI472051, AI689840, |
| | | | | | AI819324, AI802140, AI808204, AI018575, |
| | | | | | AI708063, AA044874, N33369, AI458889, |
| | | | | | AI798664, AI694439, AI742084, AA996109, |
| | | | | | AI268684, AI051014, AI005161, AI126407, |
| | | | | | AW295897, AI625938, AW418896, |
| | | | | | AA044826, AI564776, AA983545, H92520, |
| | | | | | AI379936, AI373261, AA317357, AW139306, |
| | | | | | AI521441, AI264270, AI498702, AI244808, |
| | | | | | AI948596, H77889, AW135452, AI021975, |
| | | | | | AI985535, AW242712, R00296, AA677354, |
| | | | | | N35293, AA938619, AI948603, H58937, |
| | | | | | AA917514, AI393979, AA779970. AI768427, |
| | | | | | AW044210, W25595, T99948, AA883635, |
| | | | | | AW072204, AI470848, AW351592, |
| | | | | | AW020604, H92521, AI955919, AI208112, |
| | | | | | AI919367, H58984, AA335622, AI308950, |
| | | | | | AF126781, and AI085468. |
| HORBP08 | 134 | 1220903 | 1-5755 | 15-5769 | AI917724, AI342006, AI261611, AI750970, |
| | | | | | N33407, AI825646, AA482392, AI459225, |
| | | | | | W47029, AA971699, N44869, W47220, |
| | | | | | AA284278, AI905640, AI905601, AI005408, |
| | | | | | AI806281, and AW137913. |
| HKGDI91 | 135 | 1111281 | 1-969 | 15-983 | AI952995, AW071872, AW297176, |
| | | | | | AW131657, AI871511, AI568544, AI884982, |
| | | | | | AI887085, AI214075, AW295595, AI356220, |
| | | | | | AW297665, AW006191, AI423713, |
| | | | | | AI383368, AW294321, AI363919, F31634, |
| | | | | | AI133083, AI523477, AI096714, F23268, |
| | | | | | AI620666, AI469468, AI627917, N55515, |
| | | | | | AI378437, T05617, AA565911, T90931, |
| | | | | | AI671077, R70884, AA077886, AI905408, |
| | | | | | AA932787, AW084967, N48099, AA081770, |
| | | | | | AI445774, AW237905, R70883, AI859744, |
| | | | | | AI758858, AA612727, AI929298, AI929825, |
| | | | | | AW242279, AW157180, AF084576, |
| | | | | | AC002351, AC008039, AC004655, |
| | | | | | AC005777, AF196779, AL009181, AL031848, |
| | | | | | AC006236, AC006064, AC005952, |
| | | | | | AE165926, AC007193, Z97989, AL020998, |
| | | | | | AL049780, AL008718, AL034429, AC006449, |
| | | | | | AC004770, AC005191, AL034423, |
| | | | | | AL050308, AC004000, Z85996, AF207550, |
| | | | | | AC006530, AL008582, AC007277, |
| | | | | | AC005969, AC004217, AC004827, |
| | | | | | AC004812, AL024508, Z98950, AC007546, |
| | | | | | AL035685, AE015416, AL049829, AL023653, |
| | | | | | AP000248, AL035450, AC008268, AL022149, |
| | | | | | AC010205, AC005409, AC000134, |
| | | | | | AC005765, AC006059, AL049843, |
| | | | | | AC007263, AC004526, AL122020, |
| | | | | | AC004616, AB003151, AC007544, L48038, |
| | | | | | AC009542, AC005803, AL031427, |
| | | | | | AC005043, AL117694, AC009330, AP000704, |
| | | | | | AC007066, AF196969, Z84469, Z98884, |
| | | | | | AF195658, AC007021, AC004254, AL035462, |
| | | | | | AC005668, AC012085, AC005695, |
| | | | | | AC004914, AC000026, Z94056, Z97195, |
| | | | | | AC003690, AC004841, AL096766, |
| | | | | | AL034420, AC004228, AC007686, |
| | | | | | AL049759, AB023048, AL035417, |
| | | | | | AC005318, AC012384, AC004522, |
| | | | | | AF095901, AL022323, AC004882, AC004030, |
| | | | | | AP001063, AC007040, and AC006254. |
| HNHNP81 | 136 | 928378 | 1-604 | 15-618 | D51060, C14014, D58283, AA305409, |
| | | | | | D80253, D80024, D80166, D59619, D80210, |
| | | | | | D80240, D80366, AA514186, C14389, |
| | | | | | D80043, D81030, D80133, D80247, D59859, |
| | | | | | D80212, D51799, D80164, D80219, D51423, |
| | | | | | D80022, D80391, D59787, D80195, D80188, |
| | | | | | D80248, C14331, D59502, D59467, D57483, |
| | | | | | D59275, D59610, D80227, D81026, D50995, |
| | | | | | D80196, D80439, D80251, D80269, D59889, |
| | | | | | D51022, D50979, D80268, D80522, C15076, |
| | | | | | D59927, AA305578, D80038, D80193, |
| | | | | | D80045, D80241, AA514188, AW360811, |
| | | | | | D80378, AW177440, D80302, C05695, |
| | | | | | C14429, AW178893, AW377671, AW375405, |
| | | | | | D80157, T03269, C75259, AW178906, |
| | | | | | AW179328, AW366296, AW360844, |
| | | | | | AW360817, D59373, AW375406, D51103, |
| | | | | | AW378534, AW179332, AW377672, |
| | | | | | AW179023, AW178905, D51759, AW360841, |
| | | | | | AW378532, D58253, AW177731, AW177501, |
| | | | | | AW177511, D80132, D80134, AW352171, |
| | | | | | AW377676, AW352170, AW178907, |
| | | | | | AW378528, AW178762, AW179019, |
| | | | | | AW179024, D51250, AW176467, AW178983, |
| | | | | | AW177505, D81111, D59653, AW179020, |
| | | | | | AW178775, AW367967, AW369651, |
| | | | | | AW178909, T48593, AW177456, AW179329, |
| | | | | | AW178980, AW178914, AW177733, |
| | | | | | AW178908, AW178754, AW179018, C06015, |
| | | | | | AW352158, AW352117, D80949, AW178774, |
| | | | | | D59695, D52291, D45260, AW352120, |
| | | | | | D59627, D51079, AW179004, AW179012, |
| | | | | | AW378525, AW352163, F13647, AW360834, |
| | | | | | T11417, D80064, Z21582, D80168, C14298, |
| | | | | | AW378543, AW352174, D80258, AW177728, |
| | | | | | H67854, C14227, AW179009, AI525923, |
| | | | | | AW367950, AW178911, AW177722, D59503, |
| | | | | | AI910186, AW378540, C03092, H67866, |
| | | | | | AA809122, D51221, AW178781, D58101, |
| | | | | | AI905856, D58246, AW177508, C14407, |
| | | | | | D80228, AI525917, C14077, AW178986, |
| | | | | | AW177497, T03116, AI535686, AI535850, |
| | | | | | D59317, D51213, D80014, D59474, |
| | | | | | AW177734, AI525920, D45273, AW177723, |
| | | | | | C14973, C14344, AW378533, AA514184, |
| | | | | | D59551, C14957, AI525215, D60010, |
| | | | | | AI525235, D60214, AI525227, C14046, |
| | | | | | AI557774, AI557751, AI525912, T03048, |
| | | | | | AI525925, D51097, AI525242, AA285331, |
| | | | | | AW378542, AI525222, AW378539, Z30160, |
| | | | | | C16955, C05763, Z33452, T02974, D51053, |
| | | | | | AW360855, H67858, AI525237, C04682, |
| | | | | | D50981, T02868, C13958, AI525928, D80314, |
| | | | | | AI525238, A62298, AB028859, AR015138, |
| | | | | | AJ132110, A62300, AR008278, A84916, |
| | | | | | AF058696, A82595, AR060385, AB002449, |
| | | | | | D89785, X67155, Y17188, A94995, D26022, |
| | | | | | Y12724, A25909, A67220, A78862, D34614, |
| | | | | | AR008443, I50126, I50132, I50128, I50133, |
| | | | | | D88547, AR066488, AR016514, AR060138, |
| | | | | | A45456, A26615, AR052274, X82626, |
| | | | | | Y09669, A43192, A43190, AR038669, |
| | | | | | AR066487, A30438, I14842, AR025207, |
| | | | | | AR054175, D50010, Y17187, AR066490, |
| | | | | | AR008277, AR008281, A63261, I18367, |
| | | | | | AR008408, AR062872, A70867, AR016691, |
| | | | | | AR016690, U46128, D13509, A64136, |
| | | | | | A68321, AR060133, AB012117, I79511, |
| | | | | | X68127, U79457, AF123263, AR032065, |
| | | | | | Z82022, A63887, and AR008382. |
| HFIDL68 | 137 | 928475 | 1-516 | 15-530 | AI375172. |
| HLWFG82 | 138 | 1182318 | 1-595 | 15-609 | AI802325, AI161267, AW170791, AI885931, |
| | | | | | AI660388, AA219338, AW410057, and |
| | | | | | S56581. |
| HCHON59 | 139 | 931082 | 1-2401 | 15-2415 | AW299683, AW152065, AA315514, |
| | | | | | AA305116, AI961078, AA210776, |
| | | | | | AW236710, AA622988, R56767, W04752, |
| | | | | | AA781427, R25303, R89462, R96008, |
| | | | | | R18161, N76920, AA694165, R24760, |
| | | | | | AA740627, Z19446, AW074408, AA345403, |
| | | | | | AI076025, AA348726, T86393, AA875871, |
| | | | | | AI224620, AI916251, T99947, AA337010, |
| | | | | | AI077381, AA749291, H17194, T79510, |
| | | | | | AA004316, AA363905, AA815288, Z25140, |
| | | | | | AW044490, R89463, R17355, H17900, |
| | | | | | T98732, AA054853, AW085956, AA211903, |
| | | | | | AA716584, AW297867, Z20433, AA133996, |
| | | | | | R95999, H52630, AF029260, and A74519. |
| HEEAR06 | 140 | 1125913 | 1-928 | 15-942 | AA776394, AA441900, AA678805, AI076730, |
| | | | | | R98499, AI247998, R98454, AA180838, |
| | | | | | AA180179, AI039158, AA211777, and |
| | | | | | AL137493. |
| HHPTE06 | 141 | 1182278 | 1-2799 | 15-2813 | AL118673, AW149579, AA776056, |
| | | | | | AA490022, AA302827, AB017139, AJ132999, |
| | | | | | and AJ132998. |
| HCHNJ32 | 142 | 1219115 | 1-898 | 15-912 | AI991112, AI573258, AI589871, AI382182, |
| | | | | | AW168298, N63300, AW245578, AW245568, |
| | | | | | N30214, AI244679, AA442766, AI015935, |
| | | | | | AA625514, AA714315, AA613669, AI669114, |
| | | | | | AA433946, AA568688, AI808444, N63050, |
| | | | | | AA813327, AI281530, AI885837, N52392, |
| | | | | | AA811995, AA492250, AA507560, AI221056, |
| | | | | | AI083879, AA720021, AA446582, AI557529, |
| | | | | | AI085835, AI557530, AI304532, AA313563, |
| | | | | | AA305352, AA838602, AA430753, |
| | | | | | AA573777, AI304455, AA782093, AA446709, |
| | | | | | AI690776, T73332, AA885566, AA573537, |
| | | | | | AI566973, AA720002, AA861893, AI283278, |
| | | | | | AI304454, AI199547, AI160878, H72469, |
| | | | | | AA531050, W00555, AI472891, W00611, |
| | | | | | N32117, AI937637, N54353, H78356, |
| | | | | | H95032, M571328, T61807, AA876623, |
| | | | | | AW204782, N78252, 1165466, AI004311, |
| | | | | | R50529, AW138834, F21642, H64869, |
| | | | | | AA086353, AI264256, AA652483, AI859175, |
| | | | | | H85048, AA418354, AA501347, T61353, |
| | | | | | AA134203, T55136, 1191692, AA431169, |
| | | | | | T60510, AI141454, Z30219, AI985397, |
| | | | | | H93999, AA855127, R50625, H72870, |
| | | | | | AA291581, AA293323, AI858739, T73417, |
| | | | | | AW150864, C00330, H73548, H91789, |
| | | | | | T98646, AW300104, R86214, AA432189, |
| | | | | | AI382568, H77954, AA918480, T73347, |
| | | | | | T72288, AA478304, N59791, AI251780, |
| | | | | | F15963, AA478363, T72293, AW207071, |
| | | | | | T71510, AA230200, AI918444, AI927580, |
| | | | | | AA134202, N88648, AA974081, AI954738, |
| | | | | | AA429728, Z20777, N72798, N56787, |
| | | | | | AA541321, AA641099, T73399, T71348, |
| | | | | | H84670, T98698, AI567583, AI126088, |
| | | | | | AW440575, H78357, T72864, AA983562, |
| | | | | | Z20778, N40867, AA229346, H47484, |
| | | | | | T71167, AA230291, T72848, AI470293, |
| | | | | | AI570966, AL042384, AW168823, AI358042, |
| | | | | | AI805688, AA603709, AI869377, AI567637, |
| | | | | | AI697324, AI335426, AI348777, AW148716, |
| | | | | | AW189415, AI241792, AI678762, |
| | | | | | AW262565, AI537617, AI800453, AI500039, |
| | | | | | AI624293, AI932818, AI648684, AI345688, |
| | | | | | AI494201, AI249877, AL040241, AI623682, |
| | | | | | AI446124, AI680280, AW169624, H42825, |
| | | | | | AA464646, AI573026, AW058233, |
| | | | | | AW130849, AI570997, AL046356, |
| | | | | | AW117919, AI249962, AI310500, AI699011, |
| | | | | | AI567944, AI285586, AW088899, AI682891, |
| | | | | | AI539153, AI865334, AI280661, AI950688, |
| | | | | | AI919345, AI612813, AW089258, AI701975, |
| | | | | | AI073952, AI610645, AI696819, AI537837, |
| | | | | | AI783861, AI468872, AI680498, AI364788, |
| | | | | | AI698401, AL037558, AI587606, AI336575, |
| | | | | | AL079960, AI926878, AW088903, |
| | | | | | AW151714, AI933992, AW129230, |
| | | | | | AI567612, AI866770, AA848053, AW059713, |
| | | | | | AI866082, AI589428, AW085786, AI934276, |
| | | | | | AI539771, AI811344, AI829990, AI677797, |
| | | | | | AI625464, AW191844, AI249946, AI862024, |
| | | | | | AI866469, AW265004, AI859464, |
| | | | | | AW021373, AI918500, AW193203, |
| | | | | | AA613907, AL039390, AI922577, AI874151, |
| | | | | | AF113123, AR009500, A74991, A74992, |
| | | | | | AL080127, X93495, AL122098, I26207, |
| | | | | | I89947, I48978, AF183393, AL117432, |
| | | | | | X84990, AI8777, AF087943, Z82022. |
| | | | | | AL050393, AL133067, E03348, E03349, |
| | | | | | AR059958, AL137463, AF111851, I17544, |
| | | | | | AL122111, A08916, A08913, AL137705, |
| | | | | | I89931, S68736, A08912, A08910, 149625, |
| | | | | | X79812, A08909, AB007812, AL133010, |
| | | | | | AR038854, A08908, Y10080, AF012536, |
| | | | | | AL049382, X80340, AF159615, AL133014, |
| | | | | | U72620, AR011580, AL137556, AL122118, |
| | | | | | X53587, AL080074, I03321, AL117578, |
| | | | | | S61953, I48979, M27260, AL122093, |
| | | | | | AJ005690, AF119337, AL137526, AL110197, |
| | | | | | AF017152, U96683, AL049465, AL080137, |
| | | | | | AL080148, AL137300, AF11II12, AF162270, |
| | | | | | AF113019, AF065135, S69510, AF030513, |
| | | | | | AL122121, AF081197, AF081195, I89934, |
| | | | | | I89944, AL110221, AF017437, Y11254, |
| | | | | | AL133645, U49434, AF113691, AL110222, |
| | | | | | AL137557, AF090900, AL137480, AL137476, |
| | | | | | AL080060, AF113689, AR038969, AF113677, |
| | | | | | A65340, AL133093, AF118070, AL122050, |
| | | | | | AL080154, I42402, AB025103, X52128, |
| | | | | | AL137712, AF113676, AF158248, U80742, |
| | | | | | AL133565, AF026816, AB019565, AL122110, |
| | | | | | AF003737, AF100931, AL122049, I09360, |
| | | | | | AF067728, Y11587, E15324, U58996, |
| | | | | | L30117, AL133077, AL117440, AL117435, |
| | | | | | U35846, A03736, AF182215, AL110280, |
| | | | | | A21103, AL137429, L19437, X87582, |
| | | | | | E05822, AF132676, AL133640, AL137271, |
| | | | | | AL122106, AF061836, AL137538, AL133075, |
| | | | | | A45787, I66342, AL137547, AL137527, |
| | | | | | AL137294, AF000145, X72889, 576508, |
| | | | | | AI8788, A93016, E04233, Y08769, |
| | | | | | AF106697, AF061795, AF151685, U00686, |
| | | | | | AL122045, AF040751, AL137658, AL050277, |
| | | | | | AF113694, AF114170, X00861, S36676, |
| | | | | | AL050138, AF051325, AL049452, AF114818, |
| | | | | | A07647, Y14314, E08631, AL137558, |
| | | | | | AL080140, AL080124, AL080086, AF067790, |
| | | | | | NF113690, AF028823, AL133558, AR000496, |
| | | | | | X62580, AL137560, U39656, AL133081, |
| | | | | | AL133557, U42031, Z37987, AL122100, |
| | | | | | AL137711, Y09972, AL133016, AF146568, |
| | | | | | AL133113, S77771, AI2297, AF102578, |
| | | | | | I68732, I41145, AL133104, AL137478, |
| | | | | | AL117585, E01314, U77594, AL137273, |
| | | | | | AL117394, AF137367, AF104032, X81464, |
| | | | | | A08911, AB016226, AIF118064, U67958, |
| | | | | | AL080159, AF210052, AL133098, AF153205, |
| | | | | | AL080158, X92070, U87620, AL096744, |
| | | | | | AJ003118, AF061981, AL133568, E15569, |
| | | | | | U78525, A52563, E02221, AF106862, |
| | | | | | Z97214, AC002467, AL049460, A08907, |
| | | | | | X72387, AF215669, U00763, AL137640, |
| | | | | | AL137574, AF125948, A08915, S79832, |
| | | | | | AF106657, AL050092, AF113013, AF022363, |
| | | | | | I00734, AF078844, Y10655, AR019470, |
| | | | | | AR029490, AA418240, AA522761, and |
| | | | | | AA938645. |
| HCECQ23 | 143 | 938398 | 1-796 | 15-810 | AI480182, AI500178, AI873131, AA322958, |
| | | | | | AA322718, AI936088, R85125, R90888, |
| | | | | | H05353, AA338672, H51247, R35934, |
| | | | | | AW139057, H05303, R49451, R42549, |
| | | | | | H29245, AI654790, AI638508, R51648, |
| | | | | | AW149807, R44423, AI458144, AI419465, |
| | | | | | F02105, AI499775, Z40525, F09051, R85080, |
| | | | | | H51217, AI569283, D29763, D64009, and |
| | | | | | D64010. |
| HETIY94 | 144 | 1200480 | 1-2356 | 15-2370 | AI821661, AI734047, AI766035, AA424839, |
| | | | | | AA425730, AA723343, AC005317, |
| | | | | | AC004772, AC005316, and AC007011. |
| HNHCP79 | 145 | 565781 | 1-288 | 15-302 | |
| HEOOA49 | 146 | 942561 | 1-731 | 15-745 | AW373840, R15032, and T97932. |
| HFKKN77 | 147 | 943757 | 1-719 | 15-733 | |
| HLCMP75 | 148 | 1213792 | 1-1758 | 15-1772 | AA595199, AI339553, AI041943, AI284951, |
| | | | | | AI652283, AA430329, AI290327, AI087248, |
| | | | | | AI961855, AI952525, AA730621, AI081192, |
| | | | | | AW166405, AA747653, H12557, R55548, |
| | | | | | AI081393, R55547, H28600, AI695272, |
| | | | | | H26634, AA853085, T55811, AI367028, |
| | | | | | AI968594, AA430355, AI468799, H19258, |
| | | | | | AI864807, T55383, H26693, H00825, H27260, |
| | | | | | R23780, AI783755, F22336, AW204995, |
| | | | | | C15076, D59467, D80164, D80045, C14331, |
| | | | | | D81026, D59787, D59927, C14389, D51799, |
| | | | | | D80227, C14429, D80195, D59275, D81030, |
| | | | | | D80269, D59502, D80038, D58283, D59859, |
| | | | | | D80022, D80166, D51423, D59619, D80210, |
| | | | | | D80391, D80240, D80253, D80043, D59610, |
| | | | | | D80212, D50979, D80193, D80196, D80188, |
| | | | | | D80219, D57483, D80378, H12800, D80366, |
| | | | | | D50995, D59889, D80241, D80251, D52291, |
| | | | | | AW177440, AA305409, D80024, AW378532, |
| | | | | | D51022, AA514188, AA305578, T03269, |
| | | | | | D80522, AW178893, D51060, C75259, |
| | | | | | C14014, AW179328, C14407, D80248, |
| | | | | | T11417, D51250, AW352158, AI557751, |
| | | | | | AW369651, D80134, AW178762, AW178775, |
| | | | | | AW177501, AW177511, AW377671, D58253, |
| | | | | | AA514186, D80133, AW176467, AW360811, |
| | | | | | C05695, AW352117, F13647, AW361580, |
| | | | | | AW375405, D80268, AW378540, AI910186, |
| | | | | | AW366296, AW360844, AW360817, |
| | | | | | AW375406, AW378534, AW179332, D51213, |
| | | | | | AW377672, AW179023, AW178905, D80132, |
| | | | | | D80302, AI905856, C06015, AW352171, |
| | | | | | D80439, AW377676, AW178906, AW352170, |
| | | | | | AW177731, AI535686, AW178907, |
| | | | | | AW179019, AW179024, D59373, D80247, |
| | | | | | AW177505, AW360841, AW179020, |
| | | | | | AW178909, AW177456, AW179329, D51103, |
| | | | | | AW178980, AA809122, Z21582, AW177733, |
| | | | | | AW378528, AW178908, AW178754, |
| | | | | | AW179018, AW360834, D81111, D80157, |
| | | | | | AW178914, AW352174, AW179004, |
| | | | | | AW179012, D80014, AW378525, D51759, |
| | | | | | D51097, C14227, D80258, D59627, |
| | | | | | AW177722, AW177728, AA285331, |
| | | | | | AW179009, AW367967, AW178774, |
| | | | | | AW178911, AW378543, AW352163, T02974, |
| | | | | | N71226, AW178983, AI557774, AW352120, |
| | | | | | AW178781, T48593, D58246, D59503, |
| | | | | | D55I0I, AW177723, D59653, AI535850, |
| | | | | | D59317, D45260, C14344, AW177508, |
| | | | | | AW367950, D50168, H67854, C03092, |
| | | | | | C14975, H67866, AI525923, AW378533, |
| | | | | | D80064, D59551, AW178986, AW177497, |
| | | | | | T03116, AI525920, N66429, D45273, |
| | | | | | AW177734, AI525917, D51079, D80949, |
| | | | | | A84916, A62298, A62300, AR018138, |
| | | | | | Y17188, A82595, AJ132110, AR016808, |
| | | | | | AF058696, A25909, X67155, D26022, |
| | | | | | AB028859, A67220, D89785, A78862, |
| | | | | | D34614, AR008278, X82626, D88547, |
| | | | | | Y17187, Y12724, I82448, AR025207, U87250, |
| | | | | | A94995, AR060385, AB002449, X68127, |
| | | | | | AR008443, AB012117, A30438, I50133, |
| | | | | | I50126, I50132, I50128, I19525, A85396, |
| | | | | | AR066482, AR066488, AR016514, A44171, |
| | | | | | A85477, AR060138, A45456, A26615, |
| | | | | | AR052274, A86792, X93549, A43190, |
| | | | | | Y09669, A43192, AR038669, U79457, |
| | | | | | AR066487, I14842, U46128, AR066490, |
| | | | | | AR016691, AR016690, D88507, AR054175, |
| | | | | | I18367, D50010, AR008277, AR008281, |
| | | | | | A63261, AR008408, AR062872, A70867, |
| | | | | | AF135125, I79511, D13509, A64136, A68321, |
| | | | | | AR060133, AB023656, AF123263, |
| | | | | | AB033111, AR032065, AR060382, X93535, |
| | | | | | AR008382, and AW594568. |
| HDTBO48 | 149 | 945083 | 1-505 | 15-519 | |
| HWHQR25 | 150 | 1133921 | 1-2428 | 15-2442 | AW274822, AI819931, AI655579, AI339445, |
| | | | | | AI825674, AI160980, AW189842, |
| | | | | | AW072549, AI553935, AI307188, T07963, |
| | | | | | AA503743, AA594360, AA723221, AI768795, |
| | | | | | AA235839, AW276275, AA258721, T33811, |
| | | | | | AA526945, T07962, T33770, AW081414, |
| | | | | | AA258559, R32712, AA351359, AI962815, |
| | | | | | AI470455, AI478830, R32711, AI739631, |
| | | | | | AI191246, AA887961, AL119319, AL042551, |
| | | | | | AW392670, AL119483, AL119484, |
| | | | | | AL119324, AL134531, AL119497, AL119355, |
| | | | | | AW384394, U46351, U46349, AL119457, |
| | | | | | AW363220, AW372827, Z99396, U46341, |
| | | | | | AL119363, AL119391, U46350, U46347, |
| | | | | | AL119443, AL119444, AL043029, AL134920, |
| | | | | | M142137, AL119341, AL134538, AL119418, |
| | | | | | AL119439, AL119522, AL119396, U46346, |
| | | | | | AL119399, AL042450, AL119335, AL134533, |
| | | | | | AL037205, AL042614, AL134524, AI142139, |
| | | | | | AL119496, AL042975, U46345, AL043011, |
| | | | | | AL042984, AL043019, AL043033, AL042544, |
| | | | | | AL042965, AL134542, AL042542, AL042896, |
| | | | | | AL043003, AL119464, AB026436, |
| | | | | | AR060234, AR054110, A81671, AR066494, |
| | | | | | AR069079, and AW594704. |
| HBGMZ39 | 151 | 947112 | 1-588 | 15-602 | AI820661, AI791493, AA989356, AI791282, |
| | | | | | AI732537, AI792053, AW207804, P22360, |
| | | | | | R72427, AA505927, R22019, R72474, |
| | | | | | AC008537, AC008537, AC008537, |
| | | | | | AC019337, AC019337, and AC019337. |
| HSDFT51 | 152 | 1126334 | 1-1350 | 15-1364 | AI422221, AW269213, T11456, H84186, |
| | | | | | AI657002, AI142300, AI348147, AA705920, |
| | | | | | AA928672, AW028877, AI587025, AI765590, |
| | | | | | AA731378, W03281, AI954911, AI936593, |
| | | | | | AI355533, AI244341, AW173240, AI797712, |
| | | | | | AI219155, AW303951, AI696467, AI148012, |
| | | | | | AW148668, AI004666, AC004874, U91321, |
| | | | | | AC004804, Z99291, AC004106, AP001067, |
| | | | | | AC003087, AC004887, AC008149, |
| | | | | | AL133249, AP000966, AP001068, AL023285, |
| | | | | | AL021921, AJ011930, AL023586, U95738, |
| | | | | | AL022578, AL031056, AL133238, AC006390, |
| | | | | | AC005186, AL008733, AC006952, |
| | | | | | AC004551, AP000952, AP000132, AP000210, |
| | | | | | AC006013, AC004448, AL022148, |
| | | | | | AL079352, AP000248, AL031286, AC002523, |
| | | | | | Z97987, AL078615, AC006556, U91319, |
| | | | | | AC003091, AC002492, AC004009, |
| | | | | | AC005406, AC000393, AF188024, AL021329, |
| | | | | | AC005066, AF003528, AL109865, AL133321, |
| | | | | | AC009802, AL035246, AC006926, |
| | | | | | AC002301, AC002468, AC005598, and |
| | | | | | AF015416. |
| HS2SH04 | 153 | 1165354 | 1-1434 | 15-1448 | AW337526, AA557790, AI270370, AI792092, |
| | | | | | AI821056, AI821805, AA833896, AA833875, |
| | | | | | AA747757, AA603264, AL031291, |
| | | | | | AF134726, AC006040, AL022163, AC004217, |
| | | | | | AL049872, AC007308, AC007201, |
| | | | | | AL049764, AC006312, AL020995, |
| | | | | | AC002470, AL135783, AC004230, |
| | | | | | AL009181, AC006965, AC005914, |
| | | | | | AC004967, AL035587, U95743, AC007686, |
| | | | | | AC004019, AP000114, AP000046, AP000347, |
| | | | | | AL050312, AC004953, AP000302, AL050341, |
| | | | | | AP000692, AC005399, U95090, AC007298, |
| | | | | | AL022316, AC002316, AC005529, |
| | | | | | AL049776, AC004167, AC004408, AF001549, |
| | | | | | AC004991, AC002994, AP000030, AP000212, |
| | | | | | AP000134, AP000550, AC005971, AC005670, |
| | | | | | AC008018, AC007938, AC009721, |
| | | | | | AL049646, AC002477, AL031602, |
| | | | | | AC005015, AP000513, AL035414, AL034420, |
| | | | | | Z95113, U85195, AC005064, AL133312, |
| | | | | | Y10196, AC005081, AE000658, Z99716, |
| | | | | | AC002351, AC008044, AP000251, |
| | | | | | AC007014, AC007277, AL022398, |
| | | | | | AC004859, AC005031, AC007227, |
| | | | | | AC005215, AC005924, Z95152, AC004820, |
| | | | | | AC002303, AC003104, AL021397, |
| | | | | | AC005288, Z85986, AC004834, AP000346, |
| | | | | | AL135744, AC007021, AC005291, AF107885, |
| | | | | | AL078638, AF088219, AC002549, AF196779, |
| | | | | | AC005740, AC004797, AC008085, |
| | | | | | AC000052, Z84469, Z83844, AC004883, |
| | | | | | AC005089, AL021546, AC005519, |
| | | | | | AL022394, AC005057, AL049869, AL022320, |
| | | | | | AL034548, AL024498, AC007371, |
| | | | | | AC007664, AC005212, AC004998, |
| | | | | | AL136295, AC000025, AL050348, AL031662, |
| | | | | | U91321, AC006026, AC006019, AC005527, |
| | | | | | AC005939, AC006001, AL049636, |
| | | | | | AC006241, AC004812, AL049538, |
| | | | | | AC003070, AL132641, AC005224, |
| | | | | | AC004753, AC004695, Z85987, AC004979, |
| | | | | | AC006571, AP000356, AC002352, |
| | | | | | AC006208, AC002996, AC005486, |
| | | | | | AC005082, and AP000501. |
| HETGL74 | 154 | 1065405 | 1-493 | 15-507 | |
| HLKAB61 | 155 | 948002 | 1-284 | 15-298 | W70120, W99328, AI139986, AA135576, |
| | | | | | AA399431, N45043, AA226160, AA143555, |
| | | | | | AW024960, AA190958, and M93661. |
| HCEMK49 | 156 | 1169438 | 1-958 | 15-972 | R21312, AA323594, AI423098, T04913, |
| | | | | | N28363, AI885615, X75887, Z28367, 144675, |
| | | | | | X87096, 144674, X86406, X79881, U37142, |
| | | | | | and I44676. |
| HAJAV28 | 157 | 1186149 | 1-1621 | 15-1635 | AA913364, AW027373, AW305275, |
| | | | | | AI799031, AW117480, AA588138, |
| | | | | | AA775450, AW190848, AA411334, |
| | | | | | AA866178, W61038, AA411335, AA775769, |
| | | | | | AA769134, AA075643, N30274, AA627544, |
| | | | | | AI493881, AI147666, AA075644, AA614747, |
| | | | | | N30309, AA812101, AI025647, AA868924, |
| | | | | | AW339918, AI140386, N94919, AI143201, |
| | | | | | AI347094, AI138196, AA284960, AI933338, |
| | | | | | AI343592, AI128292, AI017993, AI492556, |
| | | | | | N20511, N41996, N42630, W72001, W69402, |
| | | | | | AI554835, AI679099, AA040263, T32745, |
| | | | | | AA872581, N29505, AI354734, AI268560, |
| | | | | | AI017992, F28362, AA448442, AI679673, |
| | | | | | AA863176, AA719956, AA444022, AI142803, |
| | | | | | AA732322, AI304774, AI475118, AA993672, |
| | | | | | AI624135, AA846235, W44314, W44778, |
| | | | | | AA305351, W37097, AA682603, W65308, |
| | | | | | AA448307, AW274816, N25416, AI339799, |
| | | | | | AI128110, D79265, AI004213, AA285117, |
| | | | | | AI149185, M285067, AI872626, AI186604, |
| | | | | | AA557809, AA444000, AI344717, AA922743, |
| | | | | | N56641, AA996037, H13966, AA515842, |
| | | | | | F37123, AA732278, AA989130, W65338, |
| | | | | | W76570, R21057, N26843, AA721150, |
| | | | | | AI239957, AI580506, R96887, AA034909, |
| | | | | | W45686, W69363, F09166, H12989, W19542, |
| | | | | | N57447, R96888, C04314, AW183468, |
| | | | | | H87003, AI719584, R24370, T35889, |
| | | | | | AI685763, AA081676, T34115, N40568, |
| | | | | | AA010732, AW023063, N63592, T35834, |
| | | | | | AW089136, AA913531, Z42311, F11505, |
| | | | | | T35841, T30076, H05630, AA863208, |
| | | | | | AA505347, T30517, H27007, AI366940, |
| | | | | | Z42248, F09167, H87002, W56871, T36163, |
| | | | | | AA040400, W19619, AA721261, AA649338, |
| | | | | | F34780, T35871, R46237, H13965, |
| | | | | | AA913094, T35833, AA034976, AA890331, |
| | | | | | AI274646, N63619, AA082031, F05477, |
| | | | | | AA603299, AA322616, AA603386, R27044, |
| | | | | | Z38484, AI564372, AI859366, F01840, |
| | | | | | R27043, R27029, R27028, AA748381, |
| | | | | | F01739, AA355325, AI859362, H53598, |
| | | | | | N46608, AA339209, and AF190797. |
| HETBR74 | 158 | 948667 | 1-863 | 15-877 | AI424957, AA865175, AI345105, AW337653, |
| | | | | | AI493383, AA992117, W86236, AW001913, |
| | | | | | T23935, AI141791, AI277560, T33653, |
| | | | | | T91218, AA469060, AA148613, AI635951, |
| | | | | | AI500569, T72018, M290957, AA159337, |
| | | | | | T32385, AI088662, AI140973, AA534837, |
| | | | | | F10818, AI703234, AA486780, AI935264, |
| | | | | | AA999981, T94771, H50506, AA774208, |
| | | | | | T98781, H51340, H43580, N57875, AI696236, |
| | | | | | H44933, N64109, N40952, and AL137633. |
| HSDJM56 | 159 | 948669 | 1-799 | 15-813 | D57175, and AC009524. |
| HCWEI19 | 160 | 1137795 | 1-289 | 15-303 | |
| HLDOA63 | 161 | 1174795 | 1-744 | 15-758 | T46901, T74588, AI868831, AL047042, |
| | | | | | ALI21270, AI568870, AI433976, AI349772, |
| | | | | | AW103371, AL135661, AW195957, |
| | | | | | AW162071, AI678302, AI702406, AL047763, |
| | | | | | AW268253, AL119049, AI349933, AI969567, |
| | | | | | AI439087, AW117882, AI250293, AI349256, |
| | | | | | AI436456, AI064830, AW274192, AI515383, |
| | | | | | AW301409, AI312152, AI349937, AI349645, |
| | | | | | AI500553, AL121365, AI687728, AI673256, |
| | | | | | AI857296, AI440426, AI863014, AW071349, |
| | | | | | AI340582, AW238730, AI281779, AI538716, |
| | | | | | AI349004, AL036146, AL036396, AW074993, |
| | | | | | AI679724, AI521012, AI500077, AI498579, |
| | | | | | AI345735, AI567632, AI567351, AI866608, |
| | | | | | AL045500, AL119791, AI433157, AI568854, |
| | | | | | AI690751, AL046849, AI633419, AW089572, |
| | | | | | AI540832, AI613017, AI686926, AI249257, |
| | | | | | AI702433, AI366549, AI343112, AI275175, |
| | | | | | AI906328, AI608667, AI697137, AW303152, |
| | | | | | AW071417, AI207510, AW169653, |
| | | | | | AL120854, AW068845, AI873731, AI349614, |
| | | | | | AI699857, AI282655, AI635461, AL036802, |
| | | | | | AI499463, AI590128, AI866002, AI497733, |
| | | | | | AI564719, AI475371, AI866887, AW235035, |
| | | | | | AI687376, AI620284, AL038605, AA640779, |
| | | | | | AA613907, AW080838, AI636456, AI307466, |
| | | | | | AI445432, AI625079, AI224992, AI907070, |
| | | | | | AI631107, AI969601, AI818683, AI499393, |
| | | | | | AL040243, AA572758, AI811863, |
| | | | | | AW148320, AI800453, AI800433, AL036980, |
| | | | | | AL036274, AL036759, AI285735, AI920968, |
| | | | | | AI800411, AI889203, AW302965, AL119748, |
| | | | | | AI349598, AI434281, AW166645, AI889839, |
| | | | | | AI597750, AI597918, AI282903, AW132121, |
| | | | | | AI690835, AI758437, AI610307, AI934036, |
| | | | | | AI469532, AI609592, AI583316, AI580190, |
| | | | | | AL120736, AI753683, AI687415, AL040169, |
| | | | | | AI919058, AI469811, AI366991, AI446606, |
| | | | | | AI680113, AL043326, AI340519, AI874109, |
| | | | | | AL038778, AI432229, AI281773, AI952114, |
| | | | | | AL048871, AI624859, AI866780, AI610645, |
| | | | | | AI269696, AL038779, AW074869, AI475134, |
| | | | | | AI671679, AI309401, AI348897, AI343059, |
| | | | | | AI696846, AI909666, AI539771, AI624668, |
| | | | | | AI620868, AI569616, AI539153, AI568855, |
| | | | | | AI345744, AL036240, AI440239, AI499131, |
| | | | | | AW301300, AI149592, AI628205, AI570384, |
| | | | | | AI687375, AW167776, AI255071, AI799199, |
| | | | | | AI813914, AI862142, AI271786, AW002342, |
| | | | | | AI921379, AW085799, AI475947, AI334902, |
| | | | | | AI818206, AI636445, AI682841, AI345111, |
| | | | | | AI907061, AI804585, AA585422, AI492540, |
| | | | | | AL047041, AI307558, AL036260, AI270055, |
| | | | | | AI500659, AI349226, AW087445, AI754897, |
| | | | | | AI281762, AI580984, AA508692, AW075351, |
| | | | | | AI609580, AW168384, AI493248, AI859733, |
| | | | | | AI687362, AI802542, AA938383, AI909662, |
| | | | | | AW026882, AL042753, AI345860, AL036247, |
| | | | | | AI499512, AW129202, AL121014, AI580240, |
| | | | | | AI696398, AI439745, AI635942, AI799305, |
| | | | | | AW268768, AW118512, AW196141, |
| | | | | | AI679764, AI445025, AL044207, AA528491, |
| | | | | | AW104724, AI610756, AL037137, |
| | | | | | AW302992, AA528822, AW183130, I48979, |
| | | | | | AF113691, AL080060, S78214, L31396, |
| | | | | | L31397, AF090934, AF090943, AF090900, |
| | | | | | AL117457, AF118064, AF125949, AF090901, |
| | | | | | Y11587, AL133640, AL050393, AL137527, |
| | | | | | AF113013, AF113694, AF090903, AF078844, |
| | | | | | AF113676, AF104032, AF118070, I89947, |
| | | | | | AL133016, AL110196, AL049938, AL049452, |
| | | | | | AL110221, AL133606, AJ242859, S68736, |
| | | | | | A93016, AR059958, AL050146, AL117460, |
| | | | | | AF113690, AF113689, I89931, AL050149, |
| | | | | | X84990, AB019565, AF090896, A08916, |
| | | | | | AL050116, AL050108, AL122050, U42766, |
| | | | | | AF106862, AL133075, A08913, AL049466, |
| | | | | | AF113677, AL049314, AL080137, AL122093, |
| | | | | | AF113019, AF017152, AL137283, AL096744, |
| | | | | | AL133093, AL133557, AJ000937, AR011880, |
| | | | | | AL050277, E03348, AL080124, AF158248, |
| | | | | | AL049430, Y16645, AL133080, AF113699, |
| | | | | | U91329, AL122121, AL133565, I48978, |
| | | | | | X63574, AL137557, AL137459, AL122123, |
| | | | | | E07361, Y11254, AF079765, AF111851, |
| | | | | | AF097996, AF091084, AL050138, AF146568, |
| | | | | | AL117394, AF125948, X82434, AF177401, |
| | | | | | AF017437, AL110225, AL117583, I49625, |
| | | | | | AJ238278, U00763, AL137550, A65341, |
| | | | | | E07108, AL133560, AL117585, AL049464, |
| | | | | | AL049382, S61953, A08910, E02349, |
| | | | | | AF067728, A08912, AL049300, AL117435, |
| | | | | | AL050024, AF091512, E05822, X70685, |
| | | | | | AC002467, I33392, AL122098, A08909, |
| | | | | | U72620, A58524, A58523, AF183393, |
| | | | | | AL137538, A03736, Z82022, AL137648, |
| | | | | | AF118094, A77033, A77035, AL137463, |
| | | | | | AL133113, AL122110, AF061943, AC007390, |
| | | | | | AL080127, AF087943, AL049283, A12297, |
| | | | | | AL137271, X72889, X96540, I03321, I09360, |
| | | | | | U80742, AL096776, X65873, U67958, |
| | | | | | AC006371, X93495, AL022147, U35846, |
| | | | | | AC004690, I66342, I42402, AL110197, |
| | | | | | AC004686, AC006336, X98834, AL137521, |
| | | | | | AL080159, AL035067, AR000496, U39656, |
| | | | | | E15569, I17767, Y09972, U95739, AC007172, |
| | | | | | AC004093, L13297, AL133072, E08263, |
| | | | | | E08264, AC007392, AF119337, AC007298, |
| | | | | | AF000145, AL133568, AF111112, AL035587, |
| | | | | | I26207, AL133104, AF106827, U58996, |
| | | | | | AF026124, AF185576, AC006112, AL133077, |
| | | | | | AR038969, AJ012755, AL137523, AL137533, |
| | | | | | L78810, AC002464, A93350, AL137560, |
| | | | | | M30514, AC004200, AL137556, AL122049, |
| | | | | | AF042090, and AL050172. |
| HSSGK13 | 162 | 1138016 | 1-695 | 15-709 | AI290875, AI680938, AI290954, AI809385, |
| | | | | | AW090713, AI809382, AI656278, AI290676, |
| | | | | | AI655905, AI814637, AA629594, AI990369, |
| | | | | | AI954146, AI290667, AI963894, AI653321, |
| | | | | | AA777006, AW246438, AI004884, AI914285, |
| | | | | | AA868085, AA811734, C20609, AA142969, |
| | | | | | AI214540, T18942, AI122726, N24152, |
| | | | | | AA012878, AI872967, AA600184, AA430289, |
| | | | | | W92314, AA059252, AA019929, AA020989, |
| | | | | | T50739, AA665477, W26392, Z21172, |
| | | | | | W81609, AA150639, AA059218, AA969737, |
| | | | | | AI769298, W92301, AA580932, AI824825, |
| | | | | | X85617, X85621, AA015710, AI694297, |
| | | | | | AI990626, AA248247, AA328166, AA412211, |
| | | | | | AL049061, AA431706, AC008013, |
| | | | | | AC006432, AC007040, and AC007880. |
| HTJND16 | 163 | 1137767 | 1-2078 | 15-2092 | AA316097, AI160786, AL042373, AI583142, |
| | | | | | AW338860, AA297776, AI567676, |
| | | | | | AA484892, AI370470, AI040051, C06329, |
| | | | | | AL044701, AI150934, AA070216, AI890857, |
| | | | | | AA676592, W96277, AA079260, AI143653, |
| | | | | | AW338021, AA441810, AA653291, |
| | | | | | AC006581, Z98946, AL109827, AL109758, |
| | | | | | AC007386, AL121603, Z93023, AL035413, |
| | | | | | AC007263, AC004878, AL035420, |
| | | | | | AL109984, AL133163, AB023051, |
| | | | | | A0005288, AF196779, AC004386, |
| | | | | | AC005484, AC000003, AC005104, |
| | | | | | AL049759, AL031228, AP000512, AC004876, |
| | | | | | AC007011, AC005565, AC004771, |
| | | | | | AC002468, D87012, AC007546, AL022322, |
| | | | | | AP000470, AB022537, AC004212, |
| | | | | | AD000092, AC005519, Z82214, AB001523, |
| | | | | | AC004832, AC006120, AL031602, AP000047, |
| | | | | | AC005014, Z98200, AC005225, AC007226, |
| | | | | | AP000115, AL049569, AC006538, AC003070, |
| | | | | | AC005004, AL139054, AF196971, AC005231, |
| | | | | | AC009263, AC005015, AB023049, |
| | | | | | AC005067, AC003689, AC007225, |
| | | | | | AC005399, AL023553, AC006450, Z93017, |
| | | | | | AP000557, AC005598, AL050318, AL049539, |
| | | | | | AC002546, AL049636, AC002425, AF053645, |
| | | | | | AL031848, AL031670, AL109623, AC006948, |
| | | | | | AP000466, AB022785, AC006011, AF031078, |
| | | | | | AC005046, AC003976, AC004849, |
| | | | | | AL022721, AP000252, AC005379, AC006084, |
| | | | | | AF030876, AC005920, AC005089, |
| | | | | | AC002476, AL022320, AC000387, |
| | | | | | AL031255, U07562, AC020663, AC005239, |
| | | | | | AC005562, AC006480, AC002310, |
| | | | | | AC006023, AC004920, AL022334, |
| | | | | | AC005200, AC006312, AC005212, |
| | | | | | AC002316, AC004150, AL096701, |
| | | | | | AC004587, AC005768, AC003688, |
| | | | | | AC007193, AP000030, AP000212, AP000134, |
| | | | | | AC005363, AF111169, AL035587, AC004777, |
| | | | | | AC006071, AC007388, AF130343, AL034549, |
| | | | | | AL024498, AC004682, AF003626, AC004025, |
| | | | | | AF121781, Z85996, AC002551, AC012627, |
| | | | | | AC005520, AC000068, AJ246003, AC005261, |
| | | | | | AL021393, AP000065, P2000502, AL050307, |
| | | | | | AL035684, AC004409, Z82178, AC006211, |
| | | | | | AC004882, Z97630, AC005291, AL031594, |
| | | | | | AC002997, AC006213, AC006160, |
| | | | | | AL022396, AC005058, AC005899, |
| | | | | | AC006441, AL031291, AL049713, AP000555, |
| | | | | | AL035667, Z98047, AC002300, L09706, |
| | | | | | AF111168, AD000812, AP000359, U62317, |
| | | | | | Z99716, AF196969, AC002314, AL035685, |
| | | | | | Z99943, AC002418, AP000355, AL035249, |
| | | | | | AP000505, AC006139, AL035423, AC005829, |
| | | | | | AL049776, AC006166, AL008735, AL035415, |
| | | | | | AC005839, AC005589, AL008719, |
| | | | | | AC003695, AC005821, AC002429, |
| | | | | | AC007981, AP000113, and AP000045. |
| HEQALP17 | 164 | 949358 | 1-807 | 15-821 | AI131555, AI769466, AA215577, AW190975, |
| | | | | | AA258335, AA258499, AL044652, S63848, |
| | | | | | Y17793, and A49045. |
| HNTOA59 | 165 | 1223513 | 1-2813 | 15-2827 | W18181, AI335263, W60570, AW305247, |
| | | | | | AI949857, AI769932, AI376764, AI018234, |
| | | | | | AI143581, W60661, AI051990, AA923566, |
| | | | | | AA873841, W68384, H11953, AI754510, |
| | | | | | H30442, AI190109, AI613113, AA456821, |
| | | | | | W68500, R16198, R60608, R16196, H18573, |
| | | | | | R20002, H30393, H11954, R44819, R60554, |
| | | | | | AI961171, H06599, H18466, AI498856, |
| | | | | | AI949054, W32128, AA374468, H30392, |
| | | | | | H30441, R16000, R16197, AA569932, |
| | | | | | AA767140, Z41415, H88480, Z45096, |
| | | | | | F08421, AI929237, N54033, AA127201, |
| | | | | | AA662224, AA319784, T16809, AA127202, |
| | | | | | T03447, AA224064, Z40835, AA095915, and |
| | | | | | AI651893. |
| HE8AZ89 | 166 | 1007929 | 1-703 | 15-717 | AA332152, AA356092, F07677, AA204763, |
| | | | | | N89342, AA309660, A98668, and AL033527. |
| HNGEO79 | 167 | 1126318 | 1-1545 | 15-1559 | AI024236, and AW403530. |
| HDPIX67 | 168 | 1182263 | 1-2932 | 15-2946 | AF147773, AF152898, AI708697, N51342, |
| | | | | | AA825888, AI292226, AI288960, N39421, |
| | | | | | AA975060, AI261689, AW291891, N48537, |
| | | | | | AI695627, AA406030, AI699867, AA406029, |
| | | | | | H26638, AL046205, AA669840, AL046409, |
| | | | | | AI284640, AW274346, AA508359, |
| | | | | | AW069510, AW303196, AI963720, |
| | | | | | AI431303, AW079792, AW301350, |
| | | | | | AA490183, AI270117, AI583283, AW193265, |
| | | | | | AW274349, AI799642, AA468244, AI370878, |
| | | | | | AI654525, AA584195, AA806796, AA846876, |
| | | | | | AL138455, AI434695, AA587604, AI972203, |
| | | | | | AW338086, AA613203, AL134972, |
| | | | | | AI537955, AA491814, AW438643, |
| | | | | | AW276827, AW265385, AA580808, |
| | | | | | AA577906, AI350211, AA503600, AI821271, |
| | | | | | AA584167, AL037683, AA623002, AI370074, |
| | | | | | AA618452, AW273218, AI375710, |
| | | | | | AA503473, AI382614, AI613280, AI754955, |
| | | | | | AI801591, AI499938, AW021583, AA467820, |
| | | | | | AA977743, F17891, AI471481, AI053672, |
| | | | | | AA713891, AI061143, AW073470, |
| | | | | | AA664581, AI732120, AI688846, AL121235, |
| | | | | | AI610159, AA720702, AW022379, |
| | | | | | AA453558, AI744995, AA653618, |
| | | | | | AW072587, AI281881, AA613227, AI919029, |
| | | | | | AI312309, AA569387, AA551503, |
| | | | | | AW440497, AA599920, AW193432, |
| | | | | | AW075511, AA847952, AA502155, |
| | | | | | AI860013, AI708125, AA488746, AA613232, |
| | | | | | AA594145, AI564185, AL119984, AA679672, |
| | | | | | AW162049, AI370094, AI633025, AI929531, |
| | | | | | AA908468, AI339850, AI434311, AW050498, |
| | | | | | AW103758, AI687260, AL040921, |
| | | | | | AA664015, AI368745, AW327868, AI457397, |
| | | | | | AI754658, AI379719, AI423625, AA507824, |
| | | | | | AA521323, AA351056, AI341664, AI281468, |
| | | | | | AL119691, AI345654, AI192631, AI366464, |
| | | | | | AA525824, H51714, AA713815, W79504, |
| | | | | | AA468131, AI061334, AI085719, AA601499, |
| | | | | | AA367986, AI619997, AA177061, |
| | | | | | AW079135, AA478355, AI133164, |
| | | | | | AL042753, AA335134, AI962050, AA984708, |
| | | | | | AI301700, AL044940, AA934680, AI298710, |
| | | | | | AA508034, AA652764, AA533725, |
| | | | | | AA658362, C75026, AL039958, AW148792, |
| | | | | | AI143242, AA579063, AI567674, AW270382, |
| | | | | | AI371070, AA610491, AI674873, AA523843, |
| | | | | | AI149478, C05986, AI289067, AL041146, |
| | | | | | AA665199, AL046898, AW270270, |
| | | | | | AW192154, AI355224, AI568678, AI635279, |
| | | | | | AI754253, AW276435, AI133297, |
| | | | | | AW029038, AA521399, AA634889, |
| | | | | | AA346458, F36273, AA502104, AI475569, |
| | | | | | AW088846, AA572713, AI814735, |
| | | | | | AA581903, N29948, AI148277, AA491831, |
| | | | | | AW261871, AA469451, AI246119, AI687343, |
| | | | | | AA493708, AI537506, AI610920, AI251436, |
| | | | | | AI110770, AA610493, AA714453, R88888, |
| | | | | | AI355206, AW440545, AA483223, AI754336, |
| | | | | | AC008372, AC004025, AC002365, |
| | | | | | AF130248, AC010197, AC005145, |
| | | | | | AC005532, AC006484, AP000042, AE000660, |
| | | | | | AC009802, AL121577, AC004519, AF067844, |
| | | | | | AC010849, U82672, AL033397, AC000126, |
| | | | | | AL133321, AL035604, AC006353, |
| | | | | | AC005902, AC004072, AC002449, |
| | | | | | AP000101, AC007157, AL008633, AL096816, |
| | | | | | AL034562, AC004887, AC004787, |
| | | | | | AC004448, AC006013, AP000952, AL121757, |
| | | | | | AC003003, AL078477, AL133445, Z82205, |
| | | | | | AC005881, AL132766, AC005279, |
| | | | | | AC008149, AC004843, AF064866, |
| | | | | | AC005913, AC012083, AL008715, |
| | | | | | AL034408, AL035446, AL133249, AL135747, |
| | | | | | AC006965, AC007743, Z97196, AL080276, |
| | | | | | AL034399, AC007968, AC005739, AP000085, |
| | | | | | AL049550, AP000264, AC006045, AF042090, |
| | | | | | AC006512, AL023280, AC004551, |
| | | | | | AL078463, Z86090, AL035462, AC005251, |
| | | | | | AF003528, AC002090, AC006578, |
| | | | | | AC007386, AC007538, AF165142, Z83846, |
| | | | | | AC004020, AF088219, AC003051, Z97195, |
| | | | | | AL035251, AC004743, AL035070, |
| | | | | | AC008085, AF165147, AL035457, AC005146, |
| | | | | | AC006222, AC006445, AC002377, |
| | | | | | AC005962, AC006925, AC005062, |
| | | | | | AP001068, AL132800, AC004589, AC004106, |
| | | | | | AL096791, AC004864, AJ011930, AC006327, |
| | | | | | AL110503, AC004664, U95743, AL034395, |
| | | | | | AC008014, AL009175, U80017, AF043945, |
| | | | | | Z98257, AL122020, AC005728, AC004963, |
| | | | | | AF060568, U91319, AC002461, AC005534, |
| | | | | | AL133392, AC005295, AP000124, AL021391, |
| | | | | | AC004862, AC007488, Z95118, AC005876, |
| | | | | | AP001067, AL078581, AL121748, AP000344, |
| | | | | | AP000014, AC002538, Z75892, AC008125, |
| | | | | | Z97632, AC006952, AL132994, AC007842, |
| | | | | | AF011889, AP000031, AL049554, AL109616, |
| | | | | | AL022163, AF109076, AC005220, AC005993, |
| | | | | | AP000493, AC007437, AC002529, AL020990, |
| | | | | | AP000432, AL049690, AP000330, AL121595, |
| | | | | | AP000964, AL035695, AC002349, AC004508, |
| | | | | | AL022161, AL034548, AC006459, |
| | | | | | AC004552, AP000210, AP000132, AC007115, |
| | | | | | AC007243, AC004744, AL031368, |
| | | | | | AL109653, AC004382, AL080316, AL022164, |
| | | | | | AC002127, AC005598, AL031656, AP000459, |
| | | | | | AC004647, AC006515, AC007221, |
| | | | | | AP000966, AC010200, AL133238, AP000107, |
| | | | | | AP000039, AL049697, AP000133, P2000211, |
| | | | | | AL031664, Z99943, AC004984, AC004780, |
| | | | | | AC004486, Z82194, AC005209, AC006360, |
| | | | | | AL009173, AC006210, AL021408, AP000431, |
| | | | | | AC006016, AC005274, AP000472, AL031346, |
| | | | | | AC003103, AC010170, AB020862, |
| | | | | | AC003961, AL121578, AC013417, |
| | | | | | AC006454, AL008627, AF200465, AC004946, |
| | | | | | AC005011, AL024506, AC007751, |
| | | | | | AC006296, AC005599, AC005815, |
| | | | | | AC008040, AC005548, Z83826, AL035451, |
| | | | | | AC001234, AF205588, AC006960, |
| | | | | | AC004533, AC004820, AL021920, |
| | | | | | AC005070, AP000280, AL133500, AC005031, |
| | | | | | AC007688, AF123462, AC004925, |
| | | | | | AC006063, AC009275, AL031653, AF001549, |
| | | | | | ACG00117, and AL031432. |
| HWLLB11 | 169 | 954849 | 1-731 | 15-745 | AI745636, and AA102414. |
| HNTEF53 | 170 | 954852 | 1-2342 | 15-2356 | AA557324, AI655577, AI696732, AI923200, |
| | | | | | AA863360, AW262723, AI697332, |
| | | | | | AW275990, AI436648, AW276183, R56515, |
| | | | | | AI362521, R53456, R53457, D62878, |
| | | | | | AA337301, AA652746, AW264444, R56123, |
| | | | | | AA319338, D79346, D79250, N56346, |
| | | | | | AA886832, and AL138223. |
| HNTND64 | 171 | 954871 | 1-392 | 15-406 | AC025090, and AC025090. |
| HFPFA83 | 172 | 955614 | 1-723 | 15-737 | C14389, C15076, D59467, D58283, D50979, |
| | | | | | D80522, D80164, D80166, D80195, D80043, |
| | | | | | D80227, D81030, D59275, D59502, D80188, |
| | | | | | D59859, D80022, C14331, D51423, D59619, |
| | | | | | D80210, D51799, D80391, D80240, D80253, |
| | | | | | D80038, D80269, D59787, D80193, D59610, |
| | | | | | D80212, D80196, D80219, D81026, D59927, |
| | | | | | D57483, D80378, AW177440, D80366, |
| | | | | | D80251, AA305409, AA305578, D59889, |
| | | | | | D50995, D80024, D80241, D51022, D80045, |
| | | | | | C14429, D51060, C75259, T03269, |
| | | | | | AW178893, AW179328, AA514188, |
| | | | | | AW378532, D80248, C14014, AW377671, |
| | | | | | D51250, AW369651, AW178762, AW178775, |
| | | | | | AW177501, D80134, AW177511, AA514186, |
| | | | | | D80133, AW176467, D58253, AW360811, |
| | | | | | AW352117, C05695, AW375405, AW352158, |
| | | | | | D80268, AI910186, D80132, AW366296, |
| | | | | | AW178906, AW360844, AW360817, |
| | | | | | AW375406, AW378534, AW179332, |
| | | | | | AW377672, AW179023, AW178905, D80302, |
| | | | | | D59627, AI905856, AW378540, AW352171, |
| | | | | | D80258, D80439, AW377676, AW352170, |
| | | | | | AW177731, AW178907, AW179019, |
| | | | | | AW179024, D59373, D80247, AW177505, |
| | | | | | AW179020, AW360841, AW178909, |
| | | | | | AW177456, AW179329, AW178980, |
| | | | | | AW177733, AW378528, AW178908, |
| | | | | | AW178754, AW179018, AW352174, Z21582, |
| | | | | | AW360834, D51103, AW179004, AW179012, |
| | | | | | C06015, AW178914, AW378525, AW367967, |
| | | | | | D80157, AW177722, D51759, AW177728, |
| | | | | | AW179009, AA285331, AW178774, |
| | | | | | AW178911, D51097, AW378543, AW352163, |
| | | | | | D58101, D80064, D58246, D80014, D59503, |
| | | | | | AW178983, AW352120, AW178781, T48593, |
| | | | | | AI535850, AW177723, T11417, D59653, |
| | | | | | AA809122, AW177508, D45260, D59317, |
| | | | | | C14975, AW378533, AW367950, F13647, |
| | | | | | D81111, H67854, C03092, C14227, H67866, |
| | | | | | AI557774, AI525923, AW177497, T02974, |
| | | | | | AI557751, AW178986, T03116, C14298, |
| | | | | | D45273, D52291, AW177734, D59474, |
| | | | | | AI525917, M525227, D59695, D60010, |
| | | | | | C14973, AI535961, C14344, C14407, |
| | | | | | AI535686, C14957, D51221, D59551, |
| | | | | | AI525920, AA514184, AI525242, D60214, |
| | | | | | T03048, C14046, AI525912, AI525235, |
| | | | | | C16955, AI525925, AI525222, D80168, |
| | | | | | AW378542, AW378539, AI525215, |
| | | | | | AI525237, C05763, Z33452, AI525928, |
| | | | | | AW360855, T02868, D51213, D31458, |
| | | | | | H67858, AR018138, AJ132110, A84916, |
| | | | | | A62300, A62298, AR008278, AF058696, |
| | | | | | AB028859, X67155, Y17188, D26022, |
| | | | | | A25909, A67220, D89785, A78862, D34614, |
| | | | | | D88547, I82448, Y12724, X82626, AR025207, |
| | | | | | AR016808, A82595, AR060385, A94995, |
| | | | | | AB002449, AR008443, AB012117, I50126, |
| | | | | | I50132, I50128, I50133, AR066488, |
| | | | | | AR016514, AR060138, A45456, A26615, |
| | | | | | A052274, A85396, AR066482, A44171, |
| | | | | | A85477, I19525, A86792, Y09669, A43192, |
| | | | | | AA007217, R53357, AA335794, AI401269, |
| | | | | | AI024367, AA131681, AA505874, AI200318, |
| | | | | | R71771, W24578, AA026712, AI676036, |
| | | | | | AA806045, AI299373, AI890667, AW118903, |
| | | | | | H29874, N92383, H92161, AI267768, |
| | | | | | AW075217, AA918168, AI885357, |
| | | | | | AW372475, AW172330, AA844743, |
| | | | | | AI149118, AI453474, AI357518, and |
| | | | | | AI262961. |
| HMCFA91 | 176 | 959954 | 1-1073 | 15-1087 | AW194384, AI921843, AW025219, |
| | | | | | AI024367, AI688167, AA861776, AI189664, |
| | | | | | AI627470, AW316534, AI200318, AA969204, |
| | | | | | AA505874, AA805925, AI077983, AI401269, |
| | | | | | W58728, AA026664, M299373, AW075217, |
| | | | | | AI676036, AI890667, AW118903, AI937114, |
| | | | | | AA573507, AA131681, AI453474, |
| | | | | | AW372475, R71771, R53357, R60094, |
| | | | | | AI149118, AA844743, AA918168, H29874, |
| | | | | | AA007217, H92161, AI262961, AA131986, |
| | | | | | T82046, AA806045, N92383, AA335794, |
| | | | | | AI024365, AI939498, W27452, AA635601, |
| | | | | | AA766069, AW243229, AW166051, |
| | | | | | AA366467, AI267768, AI572256, H92160, |
| | | | | | and R71811 |
| HTEIB14 | 177 | 1128044 | 1-739 | 15-753 | AI126171, AW172978, AI802445, AI811298, |
| | | | | | AI624106, AI807074, AI635206, W96514, |
| | | | | | AI190433, AI810701, AI271523, H43143, |
| | | | | | AI911113, AI803788, AI566934, AI187824, |
| | | | | | AA644026, AI869010, AI015017, R55050, |
| | | | | | AL043767, AA043579, AL045986, W96481, |
| | | | | | and AA568260. |
| HEAAA42 | 178 | 1128009 | 1-859 | 15-873 | AI126171, AW172978, AI802445, AI811298, |
| | | | | | AI624106, AI807074, AI635206, AI190433, |
| | | | | | W96514, AI810701, AL043767, AI271523, |
| | | | | | H43143, AI911113, AI803788, AI187824, |
| | | | | | AI566934, AA644026, AI869010, AI015017, |
| | | | | | R55050, AA043579, AL045986, W96481, and |
| | | | | | AA568260. |
| HTTFZ40 | 179 | 1219172 | 1-429 | 15-443 | AL049061, AA150639, W92301, W81514, |
| | | | | | AA431706, AW246438, AA248247, T50897, |
| | | | | | AA059252, AI214540, AC008013, AC006432, |
| | | | | | AF176315, AC008010, and AF042089. |
| HSODC08 | 180 | 1189493 | 1-1432 | 15-1446 | AW007193, N64811, AA452032, AW339062, |
| | | | | | AW340188, AA401432, AI568619, |
| | | | | | AW169936, AI680519, AI271472, AA131132, |
| | | | | | AA400000, AA885882, AI338757, H94846, |
| | | | | | AA749092, AA406402, AA771971, AI250802, |
| | | | | | AI499729, W95739, AA975465, AI147856, |
| | | | | | AI521267, W95717, AA284462, AA902995, |
| | | | | | AI969258, AI143369, AA668710, AA772776, |
| | | | | | AA410424, AI278748, AA465528, AI094421, |
| | | | | | AI280111, AI031849, AI022538, H94904, |
| | | | | | AA448926, AA932880, AA939066, N50516, |
| | | | | | AI026050, AA888455, W46552, N50572, |
| | | | | | AA448961, AA908448, AA970161, |
| | | | | | AW304057, N63986, AW004817, AA383538, |
| | | | | | AW192281, AI185874, AA131080, AI376899, |
| | | | | | AW391424, AA812994, AA383509, T89723, |
| | | | | | R11866, AI139250, T77066, AI088806, |
| | | | | | AI129789, AW055052, AI125975, AI819247, |
| | | | | | T23688, N20360, AW241784, R54185, |
| | | | | | AI369764, F04415, AA652033, AA235367, |
| | | | | | Z39152, AA227964, AI453662, AA287030, |
| | | | | | AA449688, AL041309, T19082, H69643, |
| | | | | | AA905527, AA327543, R82840, R63558, |
| | | | | | Z30290, H70490, T77372, N75661, R41336, |
| | | | | | AA483304, R63513, T03899, F03826, |
| | | | | | AA628264, R17743, T36034, R82841, |
| | | | | | Z42109, AW084208, F01646, R18488, |
| | | | | | AA449436, AI653940, AA758342, AA445917, |
| | | | | | Z44861, AA326881, AA578092, W46551, |
| | | | | | N79664, T36046, Z45556, D58699, R54184, |
| | | | | | AA227800, AW189605, F08360, AA032157, |
| | | | | | AA452066, AA032158, F04583, N89197, |
| | | | | | AA937717, AA327792, D11979, AA251236, |
| | | | | | AC005332, and AW572515. |
| HAHHE43 | 181 | 1182255 | 1-2533 | 15-2547 | AA442414, AL037261, AW070401, |
| | | | | | AI457525, AI016211, AI433014, AI240432, |
| | | | | | C21505, AW382682, AA587446, AA848047, |
| | | | | | AW074687, N38806, AI285709, AI809829, |
| | | | | | AA551399, AA226173, AC006441, |
| | | | | | AC005015, U91323, L78833, Z98200, |
| | | | | | AC004531, AC007225, AC005911, |
| | | | | | AC002302, AL008718, AC005666, |
| | | | | | AL049761, AC002420, AL031685, AF134726, |
| | | | | | AC004966, AL117258, AL031311, |
| | | | | | AC005088, AL096791, AL109758, AL023807, |
| | | | | | Z85987, AL009172, AC006014, AC005037, |
| | | | | | AC004106, AC004883, AC007277, |
| | | | | | AC004216, AC005081, Z93241, AC006270, |
| | | | | | AL139054, AC007676, U96629, AF001549, |
| | | | | | AC005089, AL031670, U91321, AC002365, |
| | | | | | AF111168, AC004893, AC005049, |
| | | | | | AC003982, AC005488, AF196779, Z84466, |
| | | | | | AL050307, AC002565, AC005531, |
| | | | | | AC004797, AP000553, AC005899, |
| | | | | | AD000092, AC003663, AL031680, |
| | | | | | AC005104, AC005071, AL031276, |
| | | | | | AL022237, AL034549, AC004491, AL080243, |
| | | | | | Z93017, AC004841, AC005011, AC005620, |
| | | | | | AC005328, AC004813, AC005484, |
| | | | | | AC007686, AC006026, AF030453, |
| | | | | | AC005102, U15422, AC005803, AL121655, |
| | | | | | AF030876, AC005722, AC005736, AP000501, |
| | | | | | AC002563, AC007216, AC008072, |
| | | | | | AF109907, AC003070, AF047825, AC007993, |
| | | | | | AC007298, AL133163, AC007283, |
| | | | | | AC007773, Z98941, Z99127, AC006480, |
| | | | | | AC003029, AF053356, AP000194, AC004834, |
| | | | | | AF001548, AC005972, L78810, AL109984, |
| | | | | | AC002059, AL109798, AL049874, Z83844, |
| | | | | | AC002550, AC007371, AC006121, |
| | | | | | AC000026, AP000502, AC006285, AL049779, |
| | | | | | AB003151, AC005409, AL024498, |
| | | | | | AL132712, AC003043, AC005180, AP000692, |
| | | | | | AC002350, AC005067, AC004253, and |
| | | | | | AF001552. |
| HWMES65 | 182 | 1126347 | 1-983 | 15-997 | AW001264, AW207107, AI816763, |
| | | | | | AW182674, and AC006237. |
| HE8N124 | 183 | 971296 | 1-737 | 15-751 | AA883367, AA332611, AA732890, AI283442, |
| | | | | | AI673342, AI631153, AI200800, AI910962, |
| | | | | | T11417, D80258, D59503, D80014, D81111, |
| | | | | | C14227, D80064, AI557751, D58246, C06015, |
| | | | | | AA514184, AI535959, AW178893, |
| | | | | | AW178907, AW375405, AW177440, |
| | | | | | AI535686, AW360834, AW178908, |
| | | | | | AW360811, D80314, AA809122, D80251, |
| | | | | | D80253, C03092, D80247, D80043, |
| | | | | | AA285331, AW176467, C14389, AW179328, |
| | | | | | T48593, AW375406, D80439, AW378534, |
| | | | | | AW179332, D58283, AW377672, AW179023, |
| | | | | | AW178905, D59859, D80022, C14331, |
| | | | | | D80166, AW177731, D80195, AA305578, |
| | | | | | D80193, D59927, T03269, D59467, D51423, |
| | | | | | D59619, AW378528, D80210, AW178906, |
| | | | | | D51799, D80391, D80164, D59275, |
| | | | | | AW178762, D80240, D80038, AW179019, |
| | | | | | D59787, D80227, AW378533, D59502, |
| | | | | | AA305409, AW378532, F13647, D45260, |
| | | | | | AW178914, AW378542, AW360855, |
| | | | | | AW377676, I50126, I50132, I50128, I50133, |
| | | | | | AF123263, A70867, D88547, AR062872, |
| | | | | | AR066488, AR016514, A62300, D50010, |
| | | | | | X82626, AR066487, Y17187, AR060138, |
| | | | | | A84916, A45456, A67220, D89785, A62298, |
| | | | | | Y09669, Y17188, AB028859, A82595, |
| | | | | | A78862, D34614, A94995, D26022, |
| | | | | | AR060385, A30438, AJ132110, AR018138, |
| | | | | | A26615, AR052274, A43192, AR008278, |
| | | | | | X67155, Y12724, A63261, A43190, |
| | | | | | AR038669, AF058696, A25909, X68127, |
| | | | | | AR008443, AB002449, AR025207, |
| | | | | | AR016691, AR016690, and U46128. |
| HHATR09 | 184 | 1126363 | 1-927 | 15-941 | AA641818, AW409775, AI539153, |
| | | | | | AW265004, AI349958, AW023338, |
| | | | | | AI538342, AI472536, AI567582, AI590118, |
| | | | | | AI570966, AA455772, AA835966, |
| | | | | | AW085786, AI677797, AW088899, |
| | | | | | AI365256, AI336754, AI538270, AI491710, |
| | | | | | AI559872, AW162194, R36271, AA999906, |
| | | | | | AI866082, AI472566, AI611743, AI824748, |
| | | | | | AI865320, AW163834, AI249946, AL038529, |
| | | | | | AI669639, AI282504, AI446124, AI348914, |
| | | | | | AW022636, AI670009, AI251221, AL043345, |
| | | | | | AI862144, AW172723, AI828574, AI633061, |
| | | | | | AI095113, M280661, AI918554, AW130930, |
| | | | | | AI434242, AI752007, AI915295, AI922561, |
| | | | | | AI491852, AL046463, AI933785, AW243637, |
| | | | | | AW019985, AI889147, AL040243, AI866770, |
| | | | | | AL079794, AI805638, AW151847, AI559863, |
| | | | | | N63128, AW168031, AW403717, AI620093, |
| | | | | | AI950692, AI569589, AI874243, N99092, |
| | | | | | AI830187, AI244380, AI886594, AW051059, |
| | | | | | AA693347, AW151729, AI571945, AI889306, |
| | | | | | AW151948, AW028840, AI952302, |
| | | | | | AI569294, AW004886, AI963062, AI539111, |
| | | | | | AA658033, AI648567, AW089006, AI281867, |
| | | | | | AI452993, AW149876, AI697149, AI799195, |
| | | | | | AW130829, AI499161, AW161579, |
| | | | | | AI624529, AL038575, AI921176, AI539771, |
| | | | | | AL049053, AW188438, AI916419, AI873638, |
| | | | | | AI242248, AW193467, AI866608, AI567802, |
| | | | | | AI345608, AW073898, AI636619, AI345415, |
| | | | | | AI345688, AL036638, AI249877, AL135024, |
| | | | | | AW168503, AI288285, AW131999, |
| | | | | | AI811811, AL048323, AI690748, AI470293, |
| | | | | | AI697207, AI250627, AI582558, AL048340, |
| | | | | | AI633477, AI537617, AW084097, |
| | | | | | AW194185, AI690813, AI923871, AI659475, |
| | | | | | AI698401, AI802240, AL036631, AI582912, |
| | | | | | AI453382, AI345471, AW059713, AA579232, |
| | | | | | AI440210, AI225004, AW151979, |
| | | | | | AW087203, AA464646, AL038864, |
| | | | | | AI418970, AW152000, AI334445, AI805688, |
| | | | | | N71180, AW129271, AW075657, AI277008, |
| | | | | | AI648408, AI366549, AI636719, AI289310, |
| | | | | | AI586931, N75771, AI553669, AL040694, |
| | | | | | H89138, AI951373, AI623682, AI564259, |
| | | | | | AI267162, AW082623, AI932949, AI865297, |
| | | | | | AI684013, AI499986, AI537677, AW263804, |
| | | | | | AI744485, AI567351, AW083804, AA830821, |
| | | | | | AI696626, AI289542, AA811736, AL040586, |
| | | | | | AI473528, AI589993, AI690536, AI921746, |
| | | | | | AW073697, AI310575, AW022494, |
| | | | | | AI345677, AA494167, AI569616, R40432, |
| | | | | | AW021091, AI886055, AA568405, AI453767, |
| | | | | | AW162189, AW007300, W46547, AI923989, |
| | | | | | AW169291, AW117919, AI340533, |
| | | | | | AI832457, AI955945, AI521095, AI114703, |
| | | | | | AI859644, AW130863, AI874151, AI888621, |
| | | | | | AI357599, AL040241, AI890507, AI352573, |
| | | | | | AW079334, AI886062, AW301409, |
| | | | | | AW026630, AL038956, AW151136, |
| | | | | | AA806719, AI419440, AI684279, AI589428, |
| | | | | | AI540674, M868163, AI561356, AL079740, |
| | | | | | AI636788, M829495, AI446373, AI500523, |
| | | | | | F26535, AW088605, AI349933, AI812080, |
| | | | | | AI950664, AI251830, AL041150, AI859464, |
| | | | | | AI680326, AW082600, AI680066, AI473451, |
| | | | | | AL118512, 148978, AL110222, AL133081, |
| | | | | | AF090901, AL133624, AL137538, AL117460, |
| | | | | | AL122098, S79832, AF022363, X06146, |
| | | | | | AI8777, AF118094, AF153205, U00686, |
| | | | | | AF040751, AF090886, AF061573, E04233, |
| | | | | | A08916, S77771, AJ005690, AF113013, |
| | | | | | X98834, I89947, AL133645, I48979, A08913, |
| | | | | | AL110218, I89931, A08912, A08910, |
| | | | | | AL137300, AL133560, AF078844, I49625, |
| | | | | | AF114170, A08909, AF158248, Z97214, |
| | | | | | AR038854, AF090943, A08908, AL080158, |
| | | | | | S76508, I00734, I89934, AF113677, X87582, |
| | | | | | E01812, U42031, AF125949, E00617, E00717, |
| | | | | | E00778, AL137276, X57961, U78525, |
| | | | | | AF106862, AF000145, AL050116, Y08769, |
| | | | | | AB019565, AL049996, AF120268, AR059958, |
| | | | | | U96683, U87620, I09499, A12297, AL096751, |
| | | | | | AJ006417, AL137292, AL117648, AF065135, |
| | | | | | AL050172, AL110296, AF094480, AF039138, |
| | | | | | AF039137, AL122123, I22272, AF067790, |
| | | | | | AJ001838, U77594, AR000496, U39656, |
| | | | | | J05032, I30339, I30334, AL080137, |
| | | | | | AF032666, AF067728, AF115392, M86826, |
| | | | | | AL117457, AL050149, AF162270, I89944, |
| | | | | | AL122110, A86558, X79812, U92068, |
| | | | | | A77033, A77035, U35146, AL110158, |
| | | | | | A07647, AL137256, I32738, AF137367, |
| | | | | | U42766, AL117432, D83989, A08907, |
| | | | | | X66862, Z72491, X54971, U72620, A57389, |
| | | | | | AF11II12, S75997, AF113694, AL133104, |
| | | | | | AF113689, AL133558, X62580, AL080154, |
| | | | | | AL110197, AL137459, AL133016, AL137658, |
| | | | | | AB029065, AI5345, X81464, AR068751, |
| | | | | | A21103, AL080060, AL137556, E03348, |
| | | | | | S63521, A65340, Y11587, Af215669, E03349, |
| | | | | | AL117626, AF151109, L30117, AF031147, |
| | | | | | AF159615, X72387, AL137574, AL110221, |
| | | | | | S69510, M27260, AL137712, AF125948, |
| | | | | | AL133077, AL117440, AF016271, U80742, |
| | | | | | AL050155, U72621, AL050393, X93495, |
| | | | | | AF102578, AL137665, AL050170, X72889, |
| | | | | | AF113691, D55641, AF119337, AF036941, |
| | | | | | AL049339, Y16645, U95114, AF132676, |
| | | | | | X80340, AF061836, X52128, X84990, |
| | | | | | X55446, AL133557, E06743, AF000301, |
| | | | | | U66274, AJ003118, AL050108, AL137660, |
| | | | | | AL133014, AL117629, AL137294, X53587, |
| | | | | | U88966, AF012536, AF113690, AF028823, |
| | | | | | AL117585, AL049460, AL110196, AL137640, |
| | | | | | AF069506, AL122106, AL117583, AF176651, |
| | | | | | AF114818, AL137711, D83032, AF205861, |
| | | | | | I66342, AL137533, AL137547, AF180525, |
| | | | | | AF113699, AL133619, E01614, E13364, |
| | | | | | U00763, E15582, E12747, AF026816, |
| | | | | | AL137429, AL133640, U90884, AF111851, |
| | | | | | AJ238278, AF026124, AL080127, AL080148, |
| | | | | | AL137527, AL133665, AL133565, A03736, |
| | | | | | AC002467, AC004686, AL137539, |
| | | | | | AL137463, Y16258, AL050277, Y16257, |
| | | | | | E02756, Y16256, L13297, E02253, AL080159, |
| | | | | | AL049382, I42402, AL117416, and A90832. |
| HNTAR65 | 185 | 1226663 | 1-7425 | 15-7439 | AI049973, AI074162, AI129798, W72413, |
| | | | | | AI742408, AI271445, AA421324, AA628934, |
| | | | | | AI809207, AI580138, AI374848, AI375883, |
| | | | | | AA007356, AA677217, AI374762, AI367657, |
| | | | | | AA205650, AI304678, AA699617, AL135602, |
| | | | | | AI751304, AA677283, AA007357, AI051577, |
| | | | | | AI703389, AI373751, AA779885, AI912137, |
| | | | | | AW338397, W76492, AA253383, AI801494, |
| | | | | | AA253409, AA4I8327, AA650047, |
| | | | | | AA872682, AI572030, AA659498, AI399798, |
| | | | | | AA112559, AI521517, AI266089, AI572944, |
| | | | | | H21758, H08513, H39571, AI220937, |
| | | | | | AI244126, H24807, AA418276, AA354918, |
| | | | | | H14450, H22230, AI751305, H39576, |
| | | | | | AA331568, AA421429, N26115, H21951, |
| | | | | | AA341091, AA341614, AI418670, AI986092, |
| | | | | | AI093927, AA368627, AA629154, AI915747, |
| | | | | | AI143110, AI363958, AI680873, AA599582, |
| | | | | | H25154, Z42644, H52517, AA907318, |
| | | | | | F02146, AI872553, AA095608, H08789, |
| | | | | | AA342530, AI638676, AL119319, R47419, |
| | | | | | AW392670, C02194, U46347, AL119399, |
| | | | | | AL119457, AL119324, AL043003, AL119484, |
| | | | | | AL119439, AW384394, AW363220, |
| | | | | | AL042544, AL119355, AL134519, AL119497, |
| | | | | | U46351, AL119443, U46350, AL119391, |
| | | | | | Z99396, AW372827, AL119363, U46349, |
| | | | | | AL119522, U46341, AL119444, AL119483, |
| | | | | | AL134132, AL134530, AL042551, AL119396, |
| | | | | | AL119341, AL134531, AL037205, AL119401, |
| | | | | | AL134527, AL134528, AL043147, U46346, |
| | | | | | AL119335, AL119418, AL134533, AL042542, |
| | | | | | AL119496, AL134538, U46345, AL042614, |
| | | | | | AL043019, AL042989, AL042450, AL042965, |
| | | | | | AL042975, AL043029, AI142134, AL042984, |
| | | | | | AL119464, AB026436, AR060234, |
| | | | | | AR066494, AR054110, A81671, and |
| | | | | | AR069079. |
| HYABP53 | 186 | 1109820 | 1-1436 | 15-1450 | AW295244, AW383680, AA291031, |
| | | | | | AA836103, AA825935, AW383670, |
| | | | | | AW451843, AW383673, AA290625, |
| | | | | | AI377702, AI347054, AL119324, AL134524, |
| | | | | | AL119457, AI431323, AL119399, AW392670, |
| | | | | | AI432666, AL042544, AI432644, AI623302, |
| | | | | | AI431307, AI431316, AI431238, AI431230, |
| | | | | | U46347, AW081103, AI432677, AI432653, |
| | | | | | AI432654, AI432650, AI431353, AI431328, |
| | | | | | AI431235, AI431312, AI431321, AI431315, |
| | | | | | AI432655, AI431310, AI431246, AI431231, |
| | | | | | AI431257, AL119443, AI431347, AL043003, |
| | | | | | AL119484, AI432657, AI431247, AI431354, |
| | | | | | AL042729, AI431350, AL119439, AL042533, |
| | | | | | AI431318, AW384394, AW363220, |
| | | | | | AL042931, AW372827, AI791349, |
| | | | | | AW129223, AI432661, AL134153, AL042655, |
| | | | | | AL042842, AL042508, AL042420, AL042853, |
| | | | | | AL119319, AL119418, AI431314, AI863305, |
| | | | | | AL043166, AL042832, AL047611, U46351, |
| | | | | | AL045327, U46350, AL135012, AI492510, |
| | | | | | AI492519, AL119391, AI432643, Z99396, |
| | | | | | AL042802, AI432675, AL042741, AL119497, |
| | | | | | AW128884, AW128900, AI431337, |
| | | | | | AL119363, AL042787, AL119355, AI432651, |
| | | | | | AI432647, U46349, AL042515, AL119522, |
| | | | | | U46341, AL119444, AL119483, AI142134, |
| | | | | | AL043295, AW084068, AL134132, |
| | | | | | AL119396, AI432674, AL134530, AL134519, |
| | | | | | AL119341, AI431330, AL134531, AL037205, |
| | | | | | AL119401, AL134527, AL134528, AI431308, |
| | | | | | AL043147, AI431243, U46346, AL119335, |
| | | | | | AL119464, AL043091, AI431248, AI432649, |
| | | | | | AL134533, AI432672, AL040207, AL042542, |
| | | | | | AL119496, AL042488, AI432665, AL134538, |
| | | | | | U46344, U46345, AL045328, AL043089, |
| | | | | | AI431241, AI284508, AL046356, AL043321. |
| | | | | | AI561182, AL042614, AF019249, AR066494, |
| | | | | | AB026436, Y17793, AR060234, AL133074, |
| | | | | | AL133053, AL133049, AL133076, AR054110, |
| | | | | | A81671, AL133068, AL122101, and |
| | | | | | AR069079. |
| HSXBV89 | 187 | 1027021 | 1-2233 | 15-2247 | Z99410, AW373793, AA553665, AI190674, |
| | | | | | AI366341, AI184600, AW004692, H10539, |
| | | | | | AA482462, R45646, AI521134, AA973962, |
| | | | | | R42556, AA720003, H11452, AA211375, |
| | | | | | R22747, AW009222, AA417872, AA632195, |
| | | | | | W39346, R52677, R61178, AA720022, |
| | | | | | R61892, T80548, R20364, H46470, F07364, |
| | | | | | R86859, R55930, Z41453, AI360146, R87776, |
| | | | | | H08592, AA483558, W38313, R55720, |
| | | | | | R43749, T30657, AA426408, H95699, |
| | | | | | AA363950, R18352, R15260, R18538, |
| | | | | | R87830, F05821, R87766, R10214, R90750, |
| | | | | | T15918, F03602, T34747, H95698, W84692, |
| | | | | | R87845, T78493, F08462, T16643, AA210976, |
| | | | | | R13935, R25677, H50912, AA349344, |
| | | | | | AI302317, Z99411, F07877, AA643729, |
| | | | | | R52724, R43750, AA522619, F02068, |
| | | | | | R43495, R41527, H52035, AI092517, |
| | | | | | AI291295, AI570476, AI951902, AI906668, |
| | | | | | AI906666, H38986, AI553790, AW268395, |
| | | | | | AI312547, AW450243, AI681390, AI344432, |
| | | | | | AL343814, N44903, W84640, AA614791, |
| | | | | | AJ245820, AJ245821, AJ245822, and |
| | | | | | AFI31749. |
| HPTZB93 | 188 | 971842 | 1-836 | 15-850 | AI279486, AW206040, AW138281, |
| | | | | | AI817720, AW205987, AW206016, |
| | | | | | AI694554, AA862263, AI860959, AI298729, |
| | | | | | AI299747, AI216051, AW340960, AI703067, |
| | | | | | AI885693, AW341220, AI681397, AI802146, |
| | | | | | AI066735, AA923300, AI127856, AI279331, |
| | | | | | AI298540, AI912139, AI630777, AW140104, |
| | | | | | AI002211, AI634502, AI268259, AI796940, |
| | | | | | AI129532, AI299414, AI914342, AI692842, |
| | | | | | AA938376, AW137441, AW207254, |
| | | | | | AI216530, AI268955, AI459037, AW136174, |
| | | | | | AI693815, AI299132, AI912208, AI301061, |
| | | | | | AI299900, AI298698, AI702631, AI298009, |
| | | | | | AI871768, AI810454, AI689870, AW016202, |
| | | | | | AI458645, AI222004, AI689871, AW102711, |
| | | | | | AI702711, AI689859, AI804311, AI732920, |
| | | | | | AI732919, AA995350, N68345, AI351290, |
| | | | | | AA825171, AA962534, AI476744, AA878309, |
| | | | | | AA974790, AA934499, AA528135, AI702851, |
| | | | | | N94016, AI187311, AW003096, AI670694, |
| | | | | | AI223259, AW139377, AA916697, AI791238, |
| | | | | | AA829735, AA885627, AI791237, AA910380, |
| | | | | | AW003320, AA911255, AA987456, |
| | | | | | AW024083, AA971615, AA916296, |
| | | | | | AA953807, and AA128824. |
| HTSHM38 | 189 | 1130648 | 1-2316 | 15-2330 | AI907172, AL043009, AI679782, AI499938, |
| | | | | | AW378532, AL046409, AI284640, AI334443, |
| | | | | | AA595782, AL119691, AI431303, |
| | | | | | AW303196, AW274349, AA587604, |
| | | | | | AW407578, AW301350, AW193265, |
| | | | | | AI270117, AI754658, AI350211, AA490183, |
| | | | | | AI110770, AL138455,AI613280, AA631507, |
| | | | | | AI341664, AI963720, AI537506, AW276827, |
| | | | | | AI289067, AW103758, AW338086, |
| | | | | | AI708009, AW419262, AA470969, AI133164, |
| | | | | | AI085719, AW088202, AI375710, AA488746, |
| | | | | | AA613227, F36273, AL138265, AW083364, |
| | | | | | AW083402, AW193432, AA610491, |
| | | | | | AW410400, AI688846, AL041690, |
| | | | | | AW438643, AW302013, AA649642, |
| | | | | | AI358571, AI801591, AI053672, AI471481, |
| | | | | | AI345654, AI814735, AI539563, AI619997, |
| | | | | | AI963263, AL079812, AL041146, AI744995, |
| | | | | | AI341548, AI281881, AI379719, AL120269, |
| | | | | | AI061334, AL038799, AI564185, AI371070, |
| | | | | | AI358343, AW406162, AI345157, AI653636, |
| | | | | | AI830390, AW238278, AI821271, |
| | | | | | AW162049, AI929531, AW247819, |
| | | | | | AW408717, AI761471, AL037683, |
| | | | | | AA164251, AA583955, AA491814, AI281697, |
| | | | | | AI610920, AI799642, AI669453, AI434695, |
| | | | | | AW276435, AI919265, AI889781, AI358501, |
| | | | | | AA577906, AL042753, AI151261, |
| | | | | | AW304584, AI718446, AW029038, |
| | | | | | AI568678, AI962050, AA177061, AI469172, |
| | | | | | AI745151, AA347927, AI286356, AL038705, |
| | | | | | AA290878, AA652057, AI339850, |
| | | | | | AW188484, AW023672, F32808, AA584581, |
| | | | | | AL042420, AA806796, AI305766, AA226153, |
| | | | | | AW339568, AL119810, AI340453, |
| | | | | | AW261871, AA623002, AI144055, AI890348, |
| | | | | | AI567674, AI282832, AI590958, AA482768, |
| | | | | | AI610159, AL044940, AA513141, AI561060, |
| | | | | | AI537955, AI587583, AI587565, AW276817, |
| | | | | | AI886629, AA347930, AW088846, AI709365, |
| | | | | | AL135405, AI344844, AI370074, AA587256, |
| | | | | | AA621858, AI499181, AA526787, AI345681, |
| | | | | | AI345675, AW148792, AI469968, AA569387, |
| | | | | | AA551503, AL119984, AI590689, AA831375, |
| | | | | | AA682912, AL041706, AL046205, |
| | | | | | AA713815, AL038785, AI287528, AA857486, |
| | | | | | AI439210, AI355224, AI305547, Z98473, |
| | | | | | AW341903, AA977743, AI312309, AI608771, |
| | | | | | AI249997, AL048925, AI674873, AI434706, |
| | | | | | AI623898, AI888752, AW167372, AL022476, |
| | | | | | AC004814, AL008716, AC007676, |
| | | | | | AL132987, AC006285, AP000501, AC006057, |
| | | | | | U62293, AC000353, AC006312, U63721, |
| | | | | | AC005057, AC005740, AL035419, |
| | | | | | AC003003, Z98051, X60459, AC005921, |
| | | | | | AC006449, AL022322, AC009516, |
| | | | | | AC007536, AC016025, AL022163, |
| | | | | | AL022238, AC007308, AP000350, AC004491, |
| | | | | | AC004812, Z83822, AJ003147, AC007057, |
| | | | | | AP000152, AP000117, AC004825, U95742, |
| | | | | | AL031311, AC002425, AL109758, |
| | | | | | AC004019, AP000112, AC007036, |
| | | | | | AC005288, AC004263, AC004858, |
| | | | | | AL133485, AC005358, AC007011, |
| | | | | | AL035659, AC002430, AF053356, Z85986, |
| | | | | | AP000300, AC000003, P2000044, AL034549, |
| | | | | | AC006111, AC002996, AC005529, |
| | | | | | AC006088, Z99716, AL109798, AC007314, |
| | | | | | AL035587, AC004890, AL117258, AP000297, |
| | | | | | AL049869, AF196970, Z93241, AC006530, |
| | | | | | AC002456, AL049745, U91322, AC005102, |
| | | | | | AC002126, AC004933, AP000045, AP000113, |
| | | | | | AF109907, Z86090, AL050318, AL023575, |
| | | | | | AP001053, U52112, AC007384, AC007114, |
| | | | | | AC006536, U91321, AC005332, AC005821, |
| | | | | | AC005412, U85195, AC004643, AC004383, |
| | | | | | L44140, AC005829, AC005089, AL022721, |
| | | | | | AC003664, AC005527, AC004531, |
| | | | | | AC004913, AC000035, AL049569, |
| | | | | | AC004815, AC000025, AF045555, |
| | | | | | AC006001, AL049757, AL024498, |
| | | | | | AC005839, AE000658, AF001552, AL049795, |
| | | | | | AC006511, AC006211, AP000031, |
| | | | | | AC005914, AB001523, AC007014, |
| | | | | | AC004895, AC006213, AL022329, |
| | | | | | AC005295, AL022315, AC002492, |
| | | | | | AC002115, AC016026, AC004477, |
| | | | | | AC005722, AC002312, AP000555, |
| | | | | | AC002310, AC002094, AC005844, |
| | | | | | AD001527, AL049780, AC006006, |
| | | | | | AL096701, AP000962, AC005874, AF134471, |
| | | | | | AC002300, AC002544, AL022316, |
| | | | | | AC007686, AC005231, AL135744, Z86061, |
| | | | | | AL034417, AC004638, D87675, AC020663, |
| | | | | | AC002470, AL035684, AP000193, AC005015, |
| | | | | | AC005086, AC004851, AC004876, |
| | | | | | AC005175, AC002400, AL117354, |
| | | | | | AC005594, AL049712, AC006925, |
| | | | | | AL049779, AC007245, AC004382, |
| | | | | | AC003101, Z97054, AC016831, AC007216, |
| | | | | | AC007510, AC007664, AC003080, |
| | | | | | AP000356, AC004821, AL080243, AL034420, |
| | | | | | AL034451, AC006480, AL049694, AL022323, |
| | | | | | AC002045, P2000151, AP000010, AL031276, |
| | | | | | AC006160, AL031659, AL023807, |
| | | | | | AC004253, AC006023, AL049766, |
| | | | | | AC006487, Z95115, Z84487, AC006946, |
| | | | | | AL031427, AF139813, AF088219, Z97196, |
| | | | | | AC006116, AC005531, AC003982, |
| | | | | | AC008372, AC005520, AC002303, Y14768, |
| | | | | | AP000552, AL031666, AC005822, AC006241, |
| | | | | | AF190465, AL021453, AC002395, AC006254, |
| | | | | | AF111168, AF111167, AC006011, AC006544, |
| | | | | | AC009247, AC005011, AC004534, |
| | | | | | AL035072, U96629, AL009177, Z93017, |
| | | | | | AC005067, AC002349, AF015262, |
| | | | | | AC002550, AF129756, L47334, AL080242, |
| | | | | | AC002350, AC018633, AC005778, |
| | | | | | AL078463, AC007225, AP000553, AC007707, |
| | | | | | AC004694, AL031587, AJ229043, AC006050, |
| | | | | | AC005081, and AC005046. |
| HLDQK77 | 190 | 1169219 | 1-2844 | 15-2858 | AW385785, AA430300, AA541688, |
| | | | | | AA776700, AA679037, AA573270, |
| | | | | | AA126614, AL045796, AI268236, AA682186, |
| | | | | | AI963606, AI926591, AW192904, AI924827, |
| | | | | | AI922590, AI032288, AI375804, AA705172, |
| | | | | | AW081541, AI800450, AA694514, AI130883, |
| | | | | | AA931725, N25288, AI270687, AI366906, |
| | | | | | AW058362, AI683319, AA436891, R59176, |
| | | | | | AI597744, AI446542, W69578, AW453004, |
| | | | | | AI911821, AI095665, AA687634, AI130013, |
| | | | | | W69579, R59232, AA722782, AI587015, |
| | | | | | AI191864, AA398533, AA676733, AI476374, |
| | | | | | AA115447, AA554327, AA759328, |
| | | | | | AW242281, AI139766, AA042956, |
| | | | | | AA886732, AA664356, AA358590, |
| | | | | | AA135916, AI565897, AW304844, |
| | | | | | AA618576, AA916086, R66162, H71919, |
| | | | | | AA363371, AA430199, AI370031, Z44808, |
| | | | | | AA320329, AI934183, AA393105, AI004140, |
| | | | | | AW452852, AA135927, AA042816, |
| | | | | | AA135926, H44791, AA813424, AI865731, |
| | | | | | R42647, T35731, R27785, T32691, AI857286, |
| | | | | | AW008428, AI631988, AA115446, |
| | | | | | AA678468, AW075384, AI569918, H44790, |
| | | | | | AI918635, AA603858, AA601518, H42641, |
| | | | | | AI745618, AI445766, R27874, AI939990, |
| | | | | | AA677131, AW364938, AI569374, |
| | | | | | AW029062, C01947, and AA732827. |
| HSCKD11 | 191 | 973894 | 1-796 | 15-810 | Z99396, AL036418, AL038837, AL037051, |
| | | | | | AL036725, AW392670, AA631969, |
| | | | | | AL039074, AL036924, AL119497, AL036858, |
| | | | | | AL038509, AL039564, AL039085, AL039156, |
| | | | | | AL039108, AL039109, AL039128, |
| | | | | | AW372827, AW384394, AL119457, |
| | | | | | AL037094, AL039659, AL119319, |
| | | | | | AW363220, AL036196, AL036190, |
| | | | | | AL119324, AL037639, AL119341, AL119484, |
| | | | | | AL119391, U46350, AL119522, AL038531, |
| | | | | | U46341, AL119443, U46351, AL037526, |
| | | | | | AL036767, AL037082, AL119483, AL119363, |
| | | | | | AL119355, AL039625, AL039648, AL045337, |
| | | | | | U46347, U46349, AL036238, AL134531, |
| | | | | | AL119335, AL042909, AL119418, AL119396, |
| | | | | | AL039678, AL039629, AL039386, AL119496, |
| | | | | | AL039423, AL036268, AL038447, AL039150, |
| | | | | | AL037077, AL037085, AL038520, AL119444, |
| | | | | | AL037205, AL040992, AL119439, AL134533, |
| | | | | | AL036998, AL036733, AL037615, AL119401, |
| | | | | | AL038851, AL042965, U46346, AL134528, |
| | | | | | AL042614, AL042975, AL134538, AL042984, |
| | | | | | AL037027, AL119399, AL039410, AL134920, |
| | | | | | U46345, AL037178, AL043029, AL036679, |
| | | | | | AL042544, AL043019, AL042542, AL036719, |
| | | | | | AL043003, AL042551, AL036191, AL042450, |
| | | | | | AL036765, AL037054, AL119464, AL036774, |
| | | | | | AL037021, AL036886, AL036836, AL036999, |
| | | | | | AL036158, AL036964, AJ243342, AR066494, |
| | | | | | AR060234, A81671, AR023813, AR064707, |
| | | | | | AR069079, AB026436, and AR054110. |
| HDPLT62 | 192 | 973945 | 1-796 | 15-810 | AW392670, U46341, AL119497, AL119443, |
| | | | | | AL119483, AW372827, AW384394, |
| | | | | | AW363220, AL119319, AL119457, |
| | | | | | AL119324, AL119396, AL119363, AL119496, |
| | | | | | Z99396, AL119484, AL119341, AL119391, |
| | | | | | AL119355, U46350, U46347, U46351, |
| | | | | | U46349, AL119444, U46346, AL119335, |
| | | | | | AL134920, AL134533, AL119439, AL119522, |
| | | | | | AL134518, AL134902, AL042975, AL134526, |
| | | | | | AL134538, AL119399, AL042965, AL037205, |
| | | | | | U46345, AL042970, AL119418, AL042614, |
| | | | | | AL134531, AL043029, AL042450, AL042995, |
| | | | | | AL043011, AL042544, AI142139, AL042542, |
| | | | | | AL043019, AL042984, AL042551, AL043003, |
| | | | | | AL119464, AL119488, AB026436, |
| | | | | | AR054110, A81671, AR060234, AR066494, |
| | | | | | and AR069079. |
| HNTCU89 | 193 | 1137760 | 1-1715 | 15-1729 | AW368397, AI679767, AI298034, M681770, |
| | | | | | AA379823, AA135903, D62730, AI572778, |
| | | | | | AI500061, AI623155, AA641818, R20540, |
| | | | | | AI590043, AW075929, AI620056, AI678623, |
| | | | | | AI479292, AI860027, AI598132, AI819545, |
| | | | | | AI918809, AI630932, AI539260, AI678480, |
| | | | | | AI688241, AW089844, AI633125, |
| | | | | | AW188525, AI628325, AI522052, AI768496, |
| | | | | | AI611810, AI621341, AI500714, AI927233, |
| | | | | | AI277260, AI589428, AI918677, AA580663, |
| | | | | | AW118518, M364167, AI440399, AI474093, |
| | | | | | AA767177, AI524179, AI521560, AI699823, |
| | | | | | AI279677, AI829432, AI696340, AW238688, |
| | | | | | AI671673, AI636507, AI913476, AI699020, |
| | | | | | AA830709, AW051088, AW080157, |
| | | | | | AI358271, AW129019, AW167201, |
| | | | | | AI918449, AI868740, AI744268, AI473426, |
| | | | | | N33175, AI627988, AI300304, AI470717, |
| | | | | | AI686808, R32821, AW198090, AW084425, |
| | | | | | AI357752, AI866119, AI698391, AI538564, |
| | | | | | AI915291, AW152182, AI579901, AI582932, |
| | | | | | AI784145, AI872423, AI619820, AA019328, |
| | | | | | AI540831, AI635216, AI889189, W46378, |
| | | | | | AW191844, AI920817, AL037602, |
| | | | | | AW148536, AI654286, AI866469, AI435253, |
| | | | | | AW022808, AL037582, AW104641, |
| | | | | | AI498067, AI697045, AA053669, AI884318, |
| | | | | | AW149937, N21402, AI638644, AI370623, |
| | | | | | AI570056, AI868680, AI432942, AI889862, |
| | | | | | AI688858, AI418681, AI678446, W74529, |
| | | | | | AI890907, AI419826, AI701097, AI961414, |
| | | | | | AW088691, AI702527, AW004606, |
| | | | | | AW008226, AI499570, AI673140, AI683173, |
| | | | | | AI802574, AI241923, F34241, AI561356, |
| | | | | | AW083374, AW149329, AI537677, |
| | | | | | AI075885, AW105296, AW148882, |
| | | | | | AI349482, AI888095, AW088717, AI860609, |
| | | | | | AI859991, AI446511, AI689557, AI800380, |
| | | | | | AI636727, AI500514, AI475331, AW162194, |
| | | | | | AI925541, AI913630, AI499335, AI927256, |
| | | | | | AI690813, AI434731, AI289791, AL118512, |
| | | | | | I48978, A77033, A77035, X99971, 133392, |
| | | | | | AR038854, I48979, Y14314, I61429, E07108, |
| | | | | | A41579, I89947, AF072546, A58545, |
| | | | | | AF106697, AL080159, A31001, AL137554, |
| | | | | | AF061981, AI8777, A52184, U75604, |
| | | | | | U80742, AL050366, AF026816, S82852, |
| | | | | | E12747, A21103, AL117587, Z13966, Z82022, |
| | | | | | U97675, AR034821, AL080148, X99226, |
| | | | | | AL050146, AL080227, AL031732, AF087943, |
| | | | | | AF126488. Z97214, AC004213, AL137530, |
| | | | | | AR023871, AL137574, U73682, AL050138, |
| | | | | | AL137478, A76335, and AL050155. |
| HELDY60 | 194 | 945815 | 1-378 | 15-392 | W03943, and T83618. |
| HGBGO22 | 195 | 1128013 | 1-1378 | 15-1392 | AI927400, AI678696, AA947645, AW295277, |
| | | | | | AA884167, AW296908, AA947188, |
| | | | | | AI984289, T28629, Z11502, X80208, and |
| | | | | | X80209. |
| HFXDP53 | 196 | 578868 | 1-307 | 15-321 | |
| HMTAV95 | 197 | 614936 | 1-395 | 15-409 | AB023187, AL137000, AL137000, and |
| | | | | | AL137000. |
| HDPGS68 | 198 | 1182262 | 1-2468 | 15-2482 | |
| HCGME42 | 199 | 1203723 | 1-1590 | 15-1604 | AW001430, AL048542, AI291283, AI185656, |
| | | | | | AA043360, AA043359, AW058241, |
| | | | | | AI348516, AI088612, AA971411, AA740344, |
| | | | | | AI354980, T82354, C03216, AA151718, |
| | | | | | T86918, AI921053, T86917, AI273966, |
| | | | | | AI800408, and C01482. |
| HLWAV41 | 200 | 1159074 | 1-1721 | 15-1735 | AI002566, AI928181, AI659351, AW003718, |
| | | | | | AI659661, H17004, AA207123, AW389723, |
| | | | | | AA580056, AA368259, AA641818, AI884318, |
| | | | | | AI569583, AI570807, AI469505, AI241923, |
| | | | | | AI249962, F27788, AI636588, AI568138, |
| | | | | | AI802542, AW026882, M288050, AI537261, |
| | | | | | AI433157, AI702073, AI915291, AI270706, |
| | | | | | AW131294, AW104141, AI499285, |
| | | | | | AI633125, AI538564, AW152182, AI277008, |
| | | | | | AL037582, AL037602, AI628331, AI540458, |
| | | | | | AW079572, AI473536, AA833760, AI619502, |
| | | | | | AI440239, AL040241, AI624084, AI345416, |
| | | | | | AI345612, AI635016, AI866040, AI923370, |
| | | | | | AI932794, AI345415, AI799674, AI580436, |
| | | | | | AI613038, AI670009, AW150794, AI677796, |
| | | | | | AI491710, AI249877, AI824576, AL046466, |
| | | | | | AI624293, AW051059, AW054964, |
| | | | | | AI866770, AI288285, AI635216, AI280732, |
| | | | | | AI698391, AW167021, AI500061, AI889189, |
| | | | | | AL046595, AI587606, AW083778, AI648509, |
| | | | | | AI798456, AI352274, AW008166, |
| | | | | | AW129230, AW051088, AI536638, |
| | | | | | AI538829, AI254731, AI866469, AI868931, |
| | | | | | AI499393, AI539771, AI559296, AL038605, |
| | | | | | AA806720, AW079409, AL046618, |
| | | | | | AI609375, AI470674, AW080746, AI242248, |
| | | | | | AI281772, AI571439, AI934011, AW078712, |
| | | | | | AI537187, AI673363, AI355827, AI537024, |
| | | | | | AI687127, AI926790, AI270429, AI956080, |
| | | | | | AI890833, AI909641, AI690748, AI564719, |
| | | | | | M635461, AW149925, AI590043, AI638644, |
| | | | | | AI690784, AI890214, AI687809, AW148363, |
| | | | | | AI620089, AI247293, AI612750, AW006032, |
| | | | | | AI819326, AI634345, AW118518, AI611738, |
| | | | | | AI376425, AI800155, AI866801, AI589668, |
| | | | | | AI610895, AI357940, AI432644, AI623941, |
| | | | | | AI932949, AI627988, AI799470, AI309306, |
| | | | | | AA848053, AI637584, AI579901, AI559619, |
| | | | | | AI352497, AW161156, AI468872, AI174394, |
| | | | | | AI280661, AW104724, AI680162, AI244249, |
| | | | | | AL040243, AI766348, AW167228, AI934259, |
| | | | | | AI554821, AI564259, AL134712, AI682891, |
| | | | | | AI539847, AW104827, AI445025, |
| | | | | | AW198090, AW132056, AW162194, |
| | | | | | AI871697, AI432030, AI561231, AI625079, |
| | | | | | AW020358, AI640729, AI518980, AI591387, |
| | | | | | AI540674, AW085786, AI933903, AI865334, |
| | | | | | AL079963, AW265004, AW170673, |
| | | | | | AI471909, AI923989, AI872154, AI367680, |
| | | | | | AI567128, AW024360, AI635287, AI686817, |
| | | | | | AI694157, AI886181, AW075667, AI499963, |
| | | | | | AI591075, H89138, AW148408, AI612913, |
| | | | | | AW150457, AI633000, AI281757, |
| | | | | | AW190194, AW170725, AW075669, |
| | | | | | AW087934, AI824746, AW090550, |
| | | | | | AI921281, AI469112, AI362248, AI591310, |
| | | | | | AI687362, AI912356, AW083374, |
| | | | | | AW193530, AW073270, AI817523, |
| | | | | | AI651840, AI610690, AW262767, W74529, |
| | | | | | AI653979, AI682971, AI469532, AI933589, |
| | | | | | AW051212, AA479803, AI580190, AI376872, |
| | | | | | AW151893, AL039086, AW078650, |
| | | | | | AW087207, AW302960, AI859991, |
| | | | | | AW162118, AI582932, AI473799, AI872423, |
| | | | | | AI869377, AW058304, AI670002, AI521560, |
| | | | | | AA830821, AW088628, AI921464, |
| | | | | | AW131999, AW020397, AB007935, |
| | | | | | AF031174, AC005815, U00763, AF061943, |
| | | | | | U01145, X98834, AL117432, AL137533, |
| | | | | | AF061981, AF182215, AL050149, I26207, |
| | | | | | I89947, M81784, AF139986, I48978, |
| | | | | | AL080159, U78525, AR038854, AR034830, |
| | | | | | I96214, A08913, AL137658, AI8777, A08912, |
| | | | | | AL050366, X63574, A77033, A77035, |
| | | | | | Z82022, AL137463, A08916, A08910, |
| | | | | | Z97214, A08909, AL133637, A08908, |
| | | | | | AL117460, X72889, E07108, I09499, U35846, |
| | | | | | AI8788, AJ000937, AF183393, AF100931, |
| | | | | | D16301, AF090901, X53587, AL080124, |
| | | | | | AF153205, I66342, S78214, AL133014, |
| | | | | | I89931, AI2297, Y09972, X84990, AF113690, |
| | | | | | AL122110, S75997, AR020905, I49625, |
| | | | | | AB016226, X82434, AF215669, Y11254, |
| | | | | | X80340, AF111849, AL133016, AL137488, |
| | | | | | X93495, AF032666, AJ005690, S76508, |
| | | | | | I48979, AL110280, Y08769, Y07905, |
| | | | | | AF162270, A21103, A65340, A65341, |
| | | | | | E06743, AL137271, AL137574, AL080148, |
| | | | | | AF030513, AL133113, E12747, AL137476, |
| | | | | | A15345, AF098162, AL117648, AL050116, |
| | | | | | AF110520, AL049382, AL080163, AL137480, |
| | | | | | AF207750, AF113019, AF177401, AF078844, |
| | | | | | AR038969, S36676, AL137478, L30117, |
| | | | | | AL137550, AL133665, AF205861, AL023657, |
| | | | | | AF185576, U80742, AR034821, A03736, |
| | | | | | AF067728, Y11587, AF087943, AL080154, |
| | | | | | AL117416, A08911, AF067790, AF090934, |
| | | | | | AL137538, AL122100, AF106657, AL050393, |
| | | | | | AL133565, AF026816, I89934, I89944, |
| | | | | | E03348, AF126247, AF118094, E03349, |
| | | | | | AL133640, AL133081, I42402, AL050172, |
| | | | | | AB007812, AL133080, AL110221, AL050155, |
| | | | | | AL133072, X65873, E02221, AF102578, |
| | | | | | AL137459, AF111112, AL050277, AF113677, |
| | | | | | AL137557, AF069506, AL110196, A93350, |
| | | | | | AL137711, AL117435, X83508, L19437, |
| | | | | | A76335, AF106697, E01314, AL133075, |
| | | | | | AF061795, AE151685, A45787, AL096744, |
| | | | | | S77771, AL117440, AF000145, X63410, |
| | | | | | AF113689, U95114, Y14314, AL137560, |
| | | | | | AF118090, E02349, AF111851, AR059958, |
| | | | | | AL117649, S79832, AF137367, AF079765, |
| | | | | | AL137521, AF022363, AF008439, AF104032, |
| | | | | | AL137479, AR011880, AL133560, A58524, |
| | | | | | A58523, AR013797, AL133067, AL050024, |
| | | | | | Y10936, AL049430, I33392, AF113699, |
| | | | | | AR029490, AL122106, AF210052, I17544, |
| | | | | | AF017152, AF090903, A23630, S68736, |
| | | | | | AL133619, AL034417, AL122121, AL137292, |
| | | | | | AJ012755, D83032, AL080074, AF012536, |
| | | | | | A08907, AR000496, AL133645, I03321, |
| | | | | | AF132676, U39656, AF061836, AL137529, |
| | | | | | A08915, AF146568, AL080126, AF003737, |
| | | | | | X79812, AL049452, AF125948, AL117583, |
| | | | | | Y10080, AL122118, E01614, E13364, |
| | | | | | AF113691, AF113013, AF106862, AF028823, |
| | | | | | I80064, X87582, AL050138, E05822, E04233, |
| | | | | | A83556, and AL133557. |
| HLDBL95 | 201 | 1220690 | 1-2500 | 15-2514 | AA706969, AA706949, AW117414, |
| | | | | | AI686177, AA593882, AA470550, W79014, |
| | | | | | AI688782, AI651586, AI989558, N55354, |
| | | | | | AA989479, AI582645, AA470503, AI696078, |
| | | | | | AI206545, AI208752, H73962, AA188667, |
| | | | | | H73294, T57251, AA298359, T56655, |
| | | | | | AA298655, W80406, AI393057, AW015923, |
| | | | | | Z42132, Z38397, AW161872, R08414, |
| | | | | | N77361, AI016001, AI815785, AW006977, |
| | | | | | AA476762, AW182225, AI680045, AI051883, |
| | | | | | AI208384, AW364174, AI758186, AA783039, |
| | | | | | N74662, AI078359, AI910556, AI001928, |
| | | | | | AA476759, W05033, AA718953, AA813472, |
| | | | | | AI937587, AI305280, AI148013, AI142301, |
| | | | | | AA309595, AI184400, AF134918, and |
| | | | | | AF086122. |
| HHFGP83 | 202 | 828162 | 1-325 | 15-339 | AC026329, and AC026348. |
| HEGAR66 | 203 | 1199137 | 1-570 | 15-584 | AA339802, W79688, and R48751. |
| HAPPY24 | 204 | 1137789 | 1-1318 | 15-1332 | AW295848, AI132995, T48851, AI247571, |
| | | | | | T48852, AA344713, AW131386, AW190967, |
| | | | | | AA400508, AA400618, AA835515, |
| | | | | | AF170485, AJ007395, AF193441, AJ130710, |
| | | | | | AJ130711, AF135027, AF195092, AF223403, |
| | | | | | AJ130712, and AJ130713. |
| HE9TK49 | 205 | 856343 | 1-314 | 15-328 | AF124351, AB012043, AF134985, AF126965, |
| | | | | | AF126966, AF134986, AIF125161, AF027984, |
| | | | | | AJ012569, AC004590, AC004590, and |
| | | | | | AC021491. |
| HORBO54 | 206 | 870674 | 1-566 | 15-580 | AW166235. |
| HFKFL92 | 207 | 1217598 | 1-943 | 15-957 | AI859297, AW301122, AI819813, AA625654, |
| | | | | | AA610590, AI601169, AI521678, AA770693, |
| | | | | | AI148402, AI797531, W56364, AA043176, |
| | | | | | AA399245, AI224414, AA412225, F25596, |
| | | | | | AA760787, AA044224, AA044343, H49207, |
| | | | | | H49393, W56338, H46471, AA483644, |
| | | | | | F35724, H41195, R83432, H45052, H46298, |
| | | | | | T71570, H46110, R45220, H47011, H41194, |
| | | | | | H46033, AA810028, H50393, R00715, |
| | | | | | AA593682, H50355, Z40409, AA043175, |
| | | | | | H45090, C14331, C14344, AA809122, |
| | | | | | D59502, C03092, D80022, C14429, D80038, |
| | | | | | C14407, D80157, D80439, D80212, D59503, |
| | | | | | C14389, D59619, D80210, D80240, D80247, |
| | | | | | D80166, D80045, D80219, D58283, D80043, |
| | | | | | D81030, D80268, D81026, D80064, D80195, |
| | | | | | T11417, AA305409, D80391, D80164, |
| | | | | | C06015, D59787, D59859, D80522, F13647, |
| | | | | | AA305578, D59467, D51423, D51799, |
| | | | | | D59275, D80253, C14046, D80227, D80193, |
| | | | | | H67866, C15076, D80248, AI535686, D80251, |
| | | | | | D80196, D80133, D51759, D80269, D59610, |
| | | | | | D80366, D80188, D51022, D80258, D59653, |
| | | | | | D50979, D50995, D59927, C14014, D51060, |
| | | | | | D80014, D57483, T03116, AW178893, |
| | | | | | D59889, D80302, AA514186, D80024, |
| | | | | | AI557751, H67854, AA514188, D58246, |
| | | | | | D81111, D45260, C14227, AW377671, |
| | | | | | D80241, D51103, D80378, D59317, |
| | | | | | AW177440, C14973, D60010, D51221, |
| | | | | | AA514184, AI525917, AW360817, D59474, |
| | | | | | AI525920, D59373, AW375405, AW360844, |
| | | | | | AW360834, D58101, D59551, AI525923, |
| | | | | | C05695, T03269, AW360811, C14957, |
| | | | | | C75259, D80168, AA305720, AW360841, |
| | | | | | D60214, AI525227, D51213, AI525235, |
| | | | | | AW178907, AW177511, AW178906, |
| | | | | | AW178908, AA285331, AW177501, |
| | | | | | AW352117, AW179328, T48593, AI557774, |
| | | | | | AW375406, C16955, AW378534, AW352171, |
| | | | | | AW179332, AW377672, AW179023, |
| | | | | | AI525242, AW178905, AW377676, |
| | | | | | AW177731, F13796, Z33452, AI525912, |
| | | | | | T02974, AW378528, AW178762, AW179019, |
| | | | | | AW179018, AW378533, AW366296, |
| | | | | | AW352120, AW378532, AI525925, |
| | | | | | AI525215, AW177505, C14298, D45273, |
| | | | | | AW378542, AW367950, AW352170, H67858, |
| | | | | | D59627, AW360855, C05763, AW178914, |
| | | | | | AW378543, N66429, Z21582, D80949, |
| | | | | | AW179020, AW178775, C06084, C13958, |
| | | | | | AW178909, C14077, Z30160, AW178774, |
| | | | | | AW378539, AW177733, AW178754, |
| | | | | | AW179024, AI525237, AW176467, D51053, |
| | | | | | AW177734, C04682, AW177456, D51750, |
| | | | | | AW178781, AW178911, AW378525, |
| | | | | | AW378540, AW352163, T02868, AI525222, |
| | | | | | D59695, AW179004, AW369651, AW179329, |
| | | | | | AW179013, AW179009, AW178980, |
| | | | | | AW178986, AF151901, AR060385, A62298, |
| | | | | | AR018138, I14842, AF058696, A62300, |
| | | | | | A82595, A84916, AB028859, AR054175, |
| | | | | | AJ132110, AR008278, AR008277, AR008281, |
| | | | | | AB002449, I50126, I50132, I50128, I50133, |
| | | | | | X67155, Y17188, A30438, A67220, |
| | | | | | AR016514, D34614, AR016691, AR016690, |
| | | | | | Y17187, U46128, AR060138, A45456, |
| | | | | | A94995, D26022, A26615, AR052274, |
| | | | | | A43192, Y12724, A63261, A43190, |
| | | | | | AR038669, AR062872, A64136, A68321, |
| | | | | | A25909, I82448, AR066488, X68127, Y09669, |
| | | | | | AR066487, A70867, D89785, A78862, I79511, |
| | | | | | AR008443, X72378, AF123263, D88547, |
| | | | | | AR032065, and AR008408. |
| HETLT82 | 208 | 883273 | 1-640 | 15-654 | AW003206, AI563909, AI809945, AA424228, |
| | | | | | and AB014526. |
| HWAEU35 | 209 | 1199854 | 1-1111 | 15-1125 | AI821267, AA669727, AL042753, AL138455, |
| | | | | | AW410784, AW029515, AA760655, |
| | | | | | AI380617, AI064955, AI253987, AA594157, |
| | | | | | AI560085, AW082076, AL045077, AI791227, |
| | | | | | H73550, AW007980, H90114, AC005670, |
| | | | | | AL031680, AC005081, L78810, AC005592, |
| | | | | | Z85996, AC005015, AC005291, AC005484, |
| | | | | | AL033527, AC003043, AL121603, AF196779, |
| | | | | | AC002316, AC005921, AC007283, |
| | | | | | AC007390, AP000557, AC006530, |
| | | | | | AC006160, AL022336, AC000085, |
| | | | | | AC007151, U07563, AC004383, Z83844, |
| | | | | | AL035587, AL009181, U91326, AC005500, |
| | | | | | U91323, U95739, AL022165, AL031737, |
| | | | | | AF113676, AC005746, U95740, AC005527, |
| | | | | | AC012384, AC005740, AC006115, |
| | | | | | AC002464, Z99716, AL022238, AC004112, |
| | | | | | AL022147, Z98742, AC008055, AL031121, |
| | | | | | AF038458, AL049776, U91319, AL031291, |
| | | | | | AC005048, AC006480, AC004674, |
| | | | | | AL031005, AC005859, AC005225, |
| | | | | | AC007731, AC004883, AC004560, |
| | | | | | AL133245, AC005815, AC007172, |
| | | | | | AC002126, AL031286, AC006449, |
| | | | | | AL050404, AC004263, AC003684, |
| | | | | | AL034374, AC005697, AP000563, AF001549, |
| | | | | | AC005529, AC005368, AC005409, |
| | | | | | AP000045, U91318, AC005105, AC005102, |
| | | | | | AC007277, AC005913, AC016830, Z86090, |
| | | | | | AD000812, AC007226, AC005391, |
| | | | | | AC004686, AL031432, AL023575, AP000696, |
| | | | | | AC007298, AL121653, AC005568, |
| | | | | | AC006468, AP000695, AL031659, Z77249, |
| | | | | | AL133404, AC005332, AC005822, |
| | | | | | AC005939, AC006139, AC007664, |
| | | | | | AC005940, AC007637, AC005886, |
| | | | | | AC004837, AC005520, AC004605, |
| | | | | | AC004887, AF091512, AC005488, AL035086, |
| | | | | | AC009247, AC009784, AC002401, Z93023, |
| | | | | | AL133163, AC003689, AJ011930, and |
| | | | | | AC007011. |
| HMWDB84 | 210 | 1002167 | 1-2602 | 15-2616 | AI659611, AI683629, AI798127, AW150924, |
| | | | | | AW377686, AW024683, AI933352, |
| | | | | | AW008595, AA489064, AA913051, |
| | | | | | AI518208, AW377683, AI418155, R23544. |
| | | | | | AA488816, AA872894, AA972544, T86112, |
| | | | | | AI383891, AP001058, AB014553, AF199028, |
| | | | | | and AP001059. |
| HMSNC17 | 211 | 1137873 | 1-3788 | 15-3802 | AA772172, AI633538, AA868788, AI400461, |
| | | | | | AA854326, AA132453, AI239666, AA053064, |
| | | | | | AA424639, AI123127, AA932586, AA053408, |
| | | | | | AA132637, AA653368, AA345850, |
| | | | | | AA960956, AL045709, AL037910, AI016704, |
| | | | | | AA468322, AI821467, AI252506, AW277109, |
| | | | | | AI924702, R83097, AI335387, AA503168, |
| | | | | | AA808263, AW263864, AA492313, H45320, |
| | | | | | AW192330, AA557486, AL135698, |
| | | | | | AA814778, H10143, AL037683, AA632845, |
| | | | | | AA584489, AI859834, AL041375, |
| | | | | | AW268190, AI732157, AI732158, AA601680, |
| | | | | | AI708444, AI132963, AA501614, AI791150, |
| | | | | | AA857381, AA715706, AW304584, |
| | | | | | AA657752, N22032, AL044858, H10859, |
| | | | | | AW148507, AA457685, R94252, AI014920, |
| | | | | | AA598649, R92629, AA508873, AW069227, |
| | | | | | AA579469, AI633168, AI872503, AI017251, |
| | | | | | AA634209, AA904137, AA805048, AI538812, |
| | | | | | AL046782, AL133243, AC004990, AL031295, |
| | | | | | AC004685, AC002039, AC002045, |
| | | | | | AL133163, AC004386, AC007172, U95742, |
| | | | | | AC005288, AL035587, AL035089, |
| | | | | | AC006285, AC006251, AC007216, |
| | | | | | AC004797, AF111168, AC007227, |
| | | | | | AC002558, AC003029, NF196779, AF001549, |
| | | | | | Z85987, Z83844, AL023803, AL022320, |
| | | | | | AL008715, AC005726, AC004019, |
| | | | | | AL049694, AC002347, AC004106, |
| | | | | | AC005921, AL049779, AL035072, |
| | | | | | AC005015, AC002288, AD000813, |
| | | | | | AC007671, AL035455, AC006539, |
| | | | | | AC004791, AC002418, AC002115, |
| | | | | | AF053356, AL049749, AC004067, AL109865, |
| | | | | | Z82214, AC006077, AC004050, AF037338, |
| | | | | | AC005189, AC005874, AF134471, AL033504, |
| | | | | | AL031595, AL110502, AC005291, |
| | | | | | AC005046, AIP000552, AC004148, |
| | | | | | AC001228, AC000052, AL031255, |
| | | | | | AL035400, AL034549, AC002375, AL121653, |
| | | | | | AC002551, AL031662, AP000690, AL109963, |
| | | | | | AL022396, AC005971, AC004819, |
| | | | | | AL117694, AP000518, AC005243, AC003071, |
| | | | | | D88270, AL050338, AL121658, AC005722, |
| | | | | | AP000555, AC008149, AC002091, AL008725, |
| | | | | | AC005678, AC005411, AC004777, |
| | | | | | AC007191, AC005747, AC002425, |
| | | | | | AC007388, AL031433, AL117355, AL096853, |
| | | | | | AL137100, AC005003, AL049835, |
| | | | | | AC005242, AC005212, AC005725, |
| | | | | | AC006571, AC006530, AL021578, |
| | | | | | AC003043, AC004888, AL022165, |
| | | | | | AC002301, AL022313, Z98742, AL031289, |
| | | | | | AC009743, AC005699, AC005081, |
| | | | | | AC005192, AC005013, AL023879, |
| | | | | | AL080243, AC003982, AC003959, |
| | | | | | AD000092, AL031577, AC004522, |
| | | | | | AC003037, AC004938, AC005821, |
| | | | | | AC002070, NF111169, AC007664, Z82097, |
| | | | | | AC005940, AC003108, AC004887, |
| | | | | | AC004584, AC012085, AC005972, U91326, |
| | | | | | AC009178, AL031003, L11910, AP000359, |
| | | | | | AP000023, AC005234, Z82194, AP000558, |
| | | | | | AB023051, AF181897, AC002394, AL022328, |
| | | | | | AC004129, AL008635, AC004837, |
| | | | | | AC007546, AL079342, AC005875, |
| | | | | | AC005695, AC006487, AC007285, |
| | | | | | AL132777, AP000563, AC007312, AL031057, |
| | | | | | AC003080, AC008498, AC002544, |
| | | | | | AC003664, AC004263, Z93241, AC007055, |
| | | | | | AL031286, AC002527, AC005592, |
| | | | | | AC006270, AC000003, AC007358, |
| | | | | | AL022318, AC005899, AC005772, |
| | | | | | AC005280, AB023049, AL049845, |
| | | | | | AC005393, AC003688, AC004816, |
| | | | | | AF196969, AC016025, AC002543, |
| | | | | | AC006441, AC005839, AL035683, |
| | | | | | AL109753, L78833, AC005755, AC004125, |
| | | | | | AP000476, AF001550, AC004003, AC005859, |
| | | | | | AC003036, AC004056, AC005160, |
| | | | | | AF205588, AL133546, AC006211, AL049554, |
| | | | | | AL035461, AC004471, AL117337, |
| | | | | | AC005037, AC004859, AC004878, AJ010770, |
| | | | | | AC004659, AC006479, AL121915, AP000344, |
| | | | | | AL008721, AL049570, AC007435, AL122021, |
| | | | | | AL034548, AC004821, Z84466, AC009464, |
| | | | | | AP000556, U76377, AL132992, AC006241, |
| | | | | | Z85986, AC005907, AL121748, AC002326, |
| | | | | | AC006262, Z95118, U52112, AC007114, |
| | | | | | AL035451, AC007666, AC007237, |
| | | | | | AL035530, AL049871, AL049829, AF165926, |
| | | | | | AC003107, and AL133500. |
| HPWAY10 | 212 | 1123453 | 1-1257 | 15-1271 | AI027613, AA332875, AW367440, |
| | | | | | AW376896, AA330257, AL042522, |
| | | | | | AW367550, AW304212, H80390, AA447076, |
| | | | | | AI923485, AW316546, R08512, AB023178, |
| | | | | | Z30174, AC007676, AC007842, AC004696, |
| | | | | | AC005498, AB021641, and X78933. |
| HOHCE52 | 213 | 1135291 | 1-1716 | 15-1730 | AW419308, AI694792, H29647, H29648, |
| | | | | | AI799607, AI884522, AI350084, AI754767, |
| | | | | | AI733856, AA613627, AI284543, AL047349, |
| | | | | | T74236, AA714110, AI267356, AA501782, |
| | | | | | AW275432, AI267450, AI912401, AA574442, |
| | | | | | AI223626, AI859438, AI291439, AA595661, |
| | | | | | AA441810, AI797998, AI061313, AI537995, |
| | | | | | AI130709, AI753672, AA742815,AI369580, |
| | | | | | AA828047, AI814682, AW068008, |
| | | | | | AW068007, H73550, AI254770, AA013168, |
| | | | | | AW419389, T74524, AW341978, AW067788, |
| | | | | | AW148775, AI251034, AI922224, AL119247, |
| | | | | | AI355246, AI160786, AA584484, AA651639, |
| | | | | | AL047467, AI250552, AI469599, AA019973, |
| | | | | | AW117740, AI922231, AW302048, |
| | | | | | AI292317, AI679002, F12574, AA706495, |
| | | | | | AW438542, AA714011, AW303098, |
| | | | | | AI251284, AI251203, AA483606, AA536040, |
| | | | | | AW103758, AI821608, H29914, AI984168, |
| | | | | | AI280504, AA433894, AW161016, |
| | | | | | AA297802, AA570740, AA298789, AI049676, |
| | | | | | AA488689, AI753365, AI955465, AW338021, |
| | | | | | AA287570, AA504818, AC020663, |
| | | | | | AB011129, AJ003147, AL049646, AC002310, |
| | | | | | AP000348, AIF118808, AF124523, AC004877, |
| | | | | | AC005261, AC004232, AC007731, |
| | | | | | AC005500, AC007228, AC004890, |
| | | | | | AC003682, Z98304, AF146367, AC006130, |
| | | | | | U82695, AC004017, AF205588, AF091512, |
| | | | | | AC003002, AL021918, X82126, AC006213, |
| | | | | | AC006116, AL117337, AC007842, U82672, |
| | | | | | AL031393, AC005678, Z98745, AC007676, |
| | | | | | AC021092, AL031985, AC003006, |
| | | | | | AC005324, AC006539, AC000378, |
| | | | | | AC004821, AL022345, AL021997, |
| | | | | | AC005822, AC002301, AL031659, |
| | | | | | AL031255, AF001549, AC004696, AC006059, |
| | | | | | AC006241, AC002519, AL096761, |
| | | | | | AC004841, AC005365, Af088219, |
| | | | | | AC006455, Z84483, Z95704, Z99716, |
| | | | | | AL135744, AC007227, AC003973, |
| | | | | | AL080317, AC006557, AC006486, |
| | | | | | AL031120, AC007707, AC004797, |
| | | | | | AC004973, AC006965, AL135960, AJ131016, |
| | | | | | AC004150, AC012627, AL133371, Z97630, |
| | | | | | AL021878, AC002287, AC005914, |
| | | | | | AL078611, Z83844, AC000026, AC003029, |
| | | | | | AL022163, AC005115, AC006211, |
| | | | | | AC006057, AL022393, AC005488, |
| | | | | | AC005071, AC006016, AC004782, |
| | | | | | AC004893, AC008045, AC007160, |
| | | | | | AC007993, AC005666, AC004491, |
| | | | | | AC001234, AP000510, AC007285, AL022147, |
| | | | | | AC006430, AC004686, AL049761, |
| | | | | | AC007243, AL031730, AF060568, AC002565, |
| | | | | | X60459, AC003037, AC018725, AC005225, |
| | | | | | AF124730, Z82190, AC007934, AC005231, |
| | | | | | AL035587, Z93023, AC006501, AC009336, |
| | | | | | AC005696, AC002314, AL031005, |
| | | | | | AL078638, AC002350, AC013256, |
| | | | | | AC005520, AC002115, AC004929, U91321, |
| | | | | | Z84487, AC005498, AC005078, AL049557, |
| | | | | | AC004674, AL109627, AB023049, |
| | | | | | AC005480, AC004778, Z93017, AC003109, |
| | | | | | AC004675, AC008126, AB023048, |
| | | | | | AC004476, AC004851, AF217403, |
| | | | | | AC004881, AC007277, AC006270, |
| | | | | | AC005041, Z84480, Z74477, AC007325, |
| | | | | | AL024507, Z82245, AC000085, AL022165, |
| | | | | | AC005539, AL031776, AC004000, AF067844, |
| | | | | | AF111168, AC003007, AC005004, |
| | | | | | AC000134, AL035423, AL121603, AL022326, |
| | | | | | AC005015, AC002316, AL031277, |
| | | | | | AC007358, AC004594, AL034420, |
| | | | | | AC007790, AL031656, U91326, AC005288, |
| | | | | | AC009516, AC002480, AL133448, |
| | | | | | AC005400, AC005243, AC003030, |
| | | | | | AF006752, Z98036, AP000346, AB014078, |
| | | | | | AP000553, AL022336, AL049869, AP000172, |
| | | | | | AL136295, AP000057, Z82215, AP000514, |
| | | | | | Z98946, AP000117, AC006597, AC004895, |
| | | | | | AL021407, AL022318, AP000125, Z73420, |
| | | | | | AL022323, AC005796, AL021808, AL031282, |
| | | | | | AL008730, AC000393, Z95115, AL035530, |
| | | | | | Z82208, AC008394, AC003043, AP000501, |
| | | | | | AC005332, AC002477, AL117694, |
| | | | | | AL035462, AC006163, AL096703, U91322, |
| | | | | | U47924, AC007055, Z79997, AL049872, |
| | | | | | L78810, AL022322, AF111169, AC004650, |
| | | | | | U63721, AC005031, and AL109952. |
| HLHCR16 | 214 | 910123 | 1-3790 | 15-3804 | AA402528, AI379350, AA716107, AI123557, |
| | | | | | AI127175, AA234106, AA234698, AI039768, |
| | | | | | N77999, AI580137, AA424560, AA419490, |
| | | | | | AI334141, R71349, AI224976, AI417798, |
| | | | | | AI080508, N58410, AI818475, AA424657, |
| | | | | | N91089, AA399612, AI144265, AA399137, |
| | | | | | AI498363, AA410986, AA235306, AA399148, |
| | | | | | AW292497, AI249102, W86869, AA115407, |
| | | | | | H81257, AI077499, H00194, H45499, R01206, |
| | | | | | AW104245, AA234880, AA367417, |
| | | | | | AA852175, F05822, AA853077, AA852176, |
| | | | | | R82875, H81245, AA298421, R71350, |
| | | | | | R22096, H81585, AI985171, T49265, H81591, |
| | | | | | AA115408, R64037, T54283, AI492930, |
| | | | | | M492932, R82876, R81695, R33935, R34138, |
| | | | | | R25630, H81595, R32025, R81696, T49264, |
| | | | | | R95688, R01319, R22040, Z21579, R33043, |
| | | | | | Z38741, AA514393, T97662, T34993, |
| | | | | | AA705441, D79105, R32078, H45500, |
| | | | | | AA707178, R30943, H81576, H81250, |
| | | | | | AI032721, AL079279, and I76197. |
| HFKJO15 | 215 | 910828 | 1-526 | 15-540 | AI148246, AW241903, AA234558, |
| | | | | | AC007731, AC005500, AC000096, |
| | | | | | AC007731, AC007731, AC005500, and |
| | | | | | AC005500. |
| HEMCL65 | 216 | 910900 | 1-453 | 15-467 | AI902552, and AI902562. |
| HMAMB94 | 217 | 910909 | 1-627 | 15-641 | AA158332, R90961, R90977, and R90972. |
| HAHFI44 | 218 | 1135975 | 1-2045 | 15-2059 | AA179600, AA179599, W30992, AA196208, |
| | | | | | F24218, N98761, AI400346, W51748, F34748, |
| | | | | | F16301, F32501, AA196149, and AA599376. |
| HKMLN95 | 219 | 914083 | 1-1965 | 15-1979 | AA551127, AI692457, AI765517, AI749951, |
| | | | | | AI631959, AI129348, AI949762, AI672100, |
| | | | | | AI609235, AI950134, AI692456, AI651144, |
| | | | | | AW189207, AI935651, AA868261, AI151427, |
| | | | | | AA044198, W63627, AI521732, AI949853, |
| | | | | | AA161274, AW300441, AI708643 |
| | | | | | AA868518, AI962729, AI150783, AI015909, |
| | | | | | AA595810, AI281874, AI819752, AI479243, |
| | | | | | AI745688, AI341421, AW022195, |
| | | | | | AW027973, AA132312, H99174, AA429830, |
| | | | | | AA070213, N52408, AI913890, AA856798, |
| | | | | | AI745679, AI554270, AA442125, AA554278, |
| | | | | | AA161275, AA702375, AW016589, N24457, |
| | | | | | AA070298, AA969821, AI635327, AA699477, |
| | | | | | AI458226, AA043064, AI982949, AW439708, |
| | | | | | AI687133, AW272645, AW177545, |
| | | | | | AA946996, AW341771, AW177556, |
| | | | | | AI342767, R99590, N95053, AW402507, |
| | | | | | AI074359, AI630618, H84183, AA557498, |
| | | | | | R25323, AA446257, R43298, AW243239, |
| | | | | | AI583569, AW194714, AA551069, R92184, |
| | | | | | AA557798, AI433955, AA714014, N66644, |
| | | | | | AI824194, R87671, T57956, AA313194, |
| | | | | | AI921595, AI208421, T57874, AA027072, |
| | | | | | AA156655, R87665, AI370681, R14400, |
| | | | | | AA352103, R87659, AA860614, AI140574, |
| | | | | | R24026, N58584, R87672, Z38717, AI870045, |
| | | | | | AW151040, R84296, AA542839, AI277638, |
| | | | | | R92288, AA307482, AI954284, AI472463, |
| | | | | | N67635, AA442124, R18926, R84303, |
| | | | | | AI632684, N72814, AI472552, Z42525, |
| | | | | | R84309, T94235, R26521, AA091407, |
| | | | | | AA876334, T26330, AA565557, AA609829, |
| | | | | | N53150, AF078850, U81186, and AF064635. |
| HCQCI06 | 220 | 915000 | 1-1190 | 15-1204 | AI123952, AI751915, AA343597, W79144, |
| | | | | | AA345718, AA304549, AA256582, W81545, |
| | | | | | D45547, AL117664, AC068763, AC068763, |
| | | | | | and AC069223. |
| HE8EI09 | 221 | 1206703 | 1-2971 | 15-2985 | AW118853, AI128005, AI304951, AI806634, |
| | | | | | AA864943, AA001739, AI859224, AI014552, |
| | | | | | W37987, AI422749, AI554797, AA776417, |
| | | | | | AW072232, AW192477, AI023423, |
| | | | | | AW451522, N51229, AI306577, AI206406, |
| | | | | | W37988, AA220245, AI888568, N24284, |
| | | | | | AA477029, AA022682, T55949, AI538443, |
| | | | | | AA527439, AA282898, T57196, T94775, |
| | | | | | AA878001, AI161044, AA022801, AA587858, |
| | | | | | M828446, AA911458, AA813028, H80241, |
| | | | | | AW179043, W03712, N32175, AI022374, |
| | | | | | AA309975, AA321764, AA884339, W79912, |
| | | | | | AI208820, AI420754, AI276411, W02715, |
| | | | | | W27545, AA353845, AI499535, W25734, |
| | | | | | W78127, AA001808, AA370906, H56404, |
| | | | | | T94024, AA321763, AI869412, AA548566, |
| | | | | | AI273624, AI339735, AW020249, AA256928, |
| | | | | | AA029852, AA334196, AA872708, |
| | | | | | AA321910, R22900, AA875968, AI146581, |
| | | | | | AA255437, R23002, H56188, AI824776, |
| | | | | | M85881, C01054, AA322397, AA339184, |
| | | | | | AA028982, L39210, and L33842. |
| HBODA38 | 222 | 923456 | 1-1882 | 15-1896 | AA196401, W79841, AA112831, AA197134, |
| | | | | | C05212, W19681, AA195812, Z25012, |
| | | | | | AI004215, Z30134, AA194641, AI809925, |
| | | | | | AA258550, Z28480, F29133, AA699576, |
| | | | | | F20387, AI129717, AA194359, AI079487, |
| | | | | | AA195355, AA195094, AA931319, F34387, |
| | | | | | Z19343, F36761, H67895, AA258604, |
| | | | | | AI378821, F19321, AI089231, R91150, |
| | | | | | AI702453, AI288969, AI313118, AI351843, |
| | | | | | F31038, N56278, AI381419, AA195356, |
| | | | | | AA131264, AA195051, AA192095, AI264911, |
| | | | | | and AA086284. |
| HCYBK19 | 223 | 925494 | 1-2664 | 15-2678 | AI829726, AI809562, AI927757, AI927758, |
| | | | | | AI927768, AW297770, AA165336, AI638072, |
| | | | | | AI149852, AW298053, AI365991, AA904547, |
| | | | | | H15885, AA985065, AI359235, AW207262, |
| | | | | | AI470080, AI421572, AA305419, AA985170, |
| | | | | | AW341104, AI423550, AI362528, AI453702, |
| | | | | | AI654827, AA927292, H91991, AI365149, |
| | | | | | AI365324, D81295, AI797740, AI357382, |
| | | | | | AI953516, AA909430, H01576, AA969956, |
| | | | | | AA379840, H52748, R37302, AA905264, |
| | | | | | Z43289, R62753, R18887, R68272, H04859, |
| | | | | | AA746048, T31617, H04764, T78758, |
| | | | | | Z44077, T32807, D60323, AA634475, |
| | | | | | H01477, AI193962, H00918, D81446, |
| | | | | | M86147, AA983881, AA318875, N64328, |
| | | | | | AA165369, Z39361, D62629, T16370, |
| | | | | | F03272, H00919, N34301, and H46107. |
| HOFNH30 | 224 | 928365 | 1-362 | 15-376 | AF186380, and AF127138. |
| HWMEV63 | 225 | 931154 | 1-440 | 15-454 | D13626, and AC078816. |
| HUUDH57 | 226 | 1156174 | 1-2519 | 15-2533 | AI888110, AI161293, AI889765, AI473943, |
| | | | | | AI423941, AI248937, AI084822, AI249135, |
| | | | | | AA361076, AI334443, AI284640, AW303196, |
| | | | | | AW301350, AA521323, AA521399, |
| | | | | | AW274349, AL138455, AL046205, |
| | | | | | AL042753, AI963720, P1042853, AA581903, |
| | | | | | AW327868, AW419262, AW270382, |
| | | | | | AL119691, AA515909, AI696962, AI754955, |
| | | | | | AI281881, AW238278, AW103758, |
| | | | | | AA468022, AL044940, AL041690, |
| | | | | | AA503473, AI110770, AA631507, AA680243, |
| | | | | | AI732120, AA610491, AL039958, AA356078, |
| | | | | | AA610493, AA584195, AW270270, |
| | | | | | AA613203, AW439558, AA164251, |
| | | | | | AL119649, AA613345, AA576336, AI133164, |
| | | | | | H10994, AL046457, AA179944, AA446657, |
| | | | | | AA613227, AI821714, AI792133, AI791913, |
| | | | | | AA737318, AL038474, AA682912, |
| | | | | | AA523837, AA483771, AL138265, |
| | | | | | AA657918, AL048925, AA994578, AI799642, |
| | | | | | AA744338, AI610159, AW088846, AI669589, |
| | | | | | F36273, AI370074, AW023672, AI355206, |
| | | | | | AI133262, AL120687, AI821785, AA653618, |
| | | | | | AI610920, AI567076, AA837677, AA280632, |
| | | | | | AA493471, AI733755, AA610783, AA126035, |
| | | | | | AA584082, AI200051, N23896, AL042420, |
| | | | | | AA806796, AI357823, AA126051, AA533725, |
| | | | | | AI471543, AA649642, AI801591, AC005778, |
| | | | | | AC005900, AL096776, AL049829, AL121603, |
| | | | | | AC002565, U95742, AL121915, AC006213, |
| | | | | | AC007298, AC005412, AF123462, AL022328, |
| | | | | | AC003977, U57009, AC007216, AC004690, |
| | | | | | AC004987, AC002059, AC007384, |
| | | | | | AC004381, AC000353, AL031281, |
| | | | | | AD000092, AC002984, AC006328, |
| | | | | | AC006344, AL122021, AC005250, |
| | | | | | AL023284, AL023575, AC004019, X54181, |
| | | | | | AC005291, AF129756, AL022163, AC007227, |
| | | | | | AL096701, AL034420, AF015156, AC002549, |
| | | | | | AC006960, AC002430, AC005242, X55926, |
| | | | | | AC008372, AC005274, AL121934, AF147275, |
| | | | | | AF118808, AC007032, U66059, AF124523, |
| | | | | | AC006989, AC002385, Z93023, L04965, |
| | | | | | AC007151, AC006999, AC007385, |
| | | | | | AC004878, AL031053, U62317, AC007285, |
| | | | | | AC005969, AL020995, U18391, AC005740, |
| | | | | | AF146367, AL136297, AC005331, AC005968, |
| | | | | | U85195, AC006270, AC005815, AL034351, |
| | | | | | AC006501, AE000658, AC004263, |
| | | | | | AC007392, AC006285, AC010072, |
| | | | | | AC005102, AL031054, AC007919, |
| | | | | | AC005019, U47924, AC005696, AC000066, |
| | | | | | U18394, AJ010770, AC004901, AL031390, |
| | | | | | AC006195, AL023882, AC002289, D83989, |
| | | | | | AL031311, AL031662, AP000962, AP000142, |
| | | | | | AC003007, AL049757, U67832, AP000557, |
| | | | | | AC002390, AC004865, AC005768, |
| | | | | | AB023054, AL035072, AC004694, |
| | | | | | AC006241, AP000552, AP000504, U69730, |
| | | | | | AC008101, AC004502, AC006211, |
| | | | | | AC006965, AC000041, AP000555, |
| | | | | | AC007541, AL049776, D84394, Z98744, |
| | | | | | AC005527, AC004592, AC005154, |
| | | | | | AC008079, S43650, AC005962, AP000304, |
| | | | | | AC005295, AP000359, AC007051, |
| | | | | | AC005821, AP001054, AF027390, AL132992, |
| | | | | | AC005747, AC005261, AC005859, |
| | | | | | AP000047, AL078477, AC005909, AF091512, |
| | | | | | AL132712, AC000052, AP000049, AP000433, |
| | | | | | AC005216, AL034343, AC004491, |
| | | | | | AC007043, Z82244, AF227510, AC004547, |
| | | | | | AC009069, AL139054, AC002094, |
| | | | | | AC018769, AC004049, AL035494, |
| | | | | | AL035425, AC004539, L44140, AL009051, |
| | | | | | AL022727, AC004953, AC005529, |
| | | | | | AC004879, AC002543, AF196779, |
| | | | | | AR036572, U91328, AC004650, AC004638, |
| | | | | | AP0G0115, AC004890, AC005362, U95740, |
| | | | | | Z86061, AC006016, AC005246, AF029308, |
| | | | | | AL031775, Z70289, AF001549, AC009516, |
| | | | | | AC009509, AP000548, AC000029, |
| | | | | | AC007274, AC007458, AF064861, AF067844, |
| | | | | | D87675, AC006044, AC007245, AC006139, |
| | | | | | AC005257, AL008716, AL050331, AL117258, |
| | | | | | AC007376, AL049692, AC006252, |
| | | | | | AC003037, AC007226, AC005378, |
| | | | | | AL133500, AL035448, AL050097, AC002994, |
| | | | | | AL021453, AC004972, AF207550, AC004970, |
| | | | | | AL031597, AC016025, AC007731, |
| | | | | | AL096861, Z99495, Z98051, AC007114, |
| | | | | | AC004183, AC002316, AL133399, |
| | | | | | AC006045, AC000072, AC000114, |
| | | | | | AC004913, AC004626, and AP000959. |
| HDQFT77 | 227 | 1157001 | 1-1357 | 15-1371 | AI582617, AW194919, AI393304, AI760916, |
| | | | | | AI378837, AI628122, AI525818, AA861720, |
| | | | | | AI682246, AA775482, AI651311, AA025281, |
| | | | | | AI857832, AI340350, AI348117, AI338259, |
| | | | | | AI015680, AI242142, AI860137, AA476668, |
| | | | | | AI200562, AA862367, AA806615, |
| | | | | | AW103824, AA968628, AA731250, |
| | | | | | AA453588, AI559269, AI871538, AA909432, |
| | | | | | AA025321, AI540267, AA975563, AI184361, |
| | | | | | AI500004, AI474803, AI590227, AL079963, |
| | | | | | AI888953, AI702406, AI620284, AL119863, |
| | | | | | AI349645, AI673297, AW026882, |
| | | | | | AW150578, AI312428, AI619502, AI284484, |
| | | | | | AI625079, AI537244, AA225339, AI637584, |
| | | | | | AI564719, AL048656, AI802542, AA572758, |
| | | | | | AL036403, AI340603, AI872711, AI569583, |
| | | | | | AI433157, AI524671, AW238730, AI538716, |
| | | | | | AA508692, AI926790, AI783504, AI521012, |
| | | | | | AL045500, AL036274, AL036146, AI554245, |
| | | | | | AI348897, AI251434, AI340582, AW074993, |
| | | | | | AW103371, AW074869, AI539771, |
| | | | | | AW087445, AI872545, AI349004, |
| | | | | | AW302988, AW183130, AW268220, |
| | | | | | AL049085, AA427700, AI815855, AI269862, |
| | | | | | AI500523, AL036396, AA640779, AI610307, |
| | | | | | AL047763, AW071417, AI537677, AI445432, |
| | | | | | AI687728, AL040243, AL045266, AI536638, |
| | | | | | AI889376, AW104724, AI569945, |
| | | | | | AW302992, AI432969, AI554427, AI702073, |
| | | | | | AI312152, AI345735, AI868831, AI133559, |
| | | | | | AI343112, AL121365, AI571909, AW078529, |
| | | | | | AI862144, AW268253, AW301300, |
| | | | | | AI922901, AI349598, AI343059, AI290154, |
| | | | | | AI890833, AI349933, AI345608, AI697137, |
| | | | | | AI590120, AW132056, AW301505, |
| | | | | | AI696612, AI497733, AI274508, AI281773, |
| | | | | | AL134259, AI313320, AI702068, AI349614, |
| | | | | | AI343030, AI866608, AI334450, AI686877, |
| | | | | | AI954183, AI284517, AI923989, AI921248, |
| | | | | | AI631107, AI440239, AW169527, AI475451, |
| | | | | | AI677796, AI702433, AI635461, AI224992, |
| | | | | | AI312146, AI312339, AI799199, AI273142, |
| | | | | | AI476046, AW129106, AI269696, AI281762, |
| | | | | | AI800453, AI800433, AL043326, AI633419, |
| | | | | | AI498579, AI866002, AI433976, AI630252, |
| | | | | | AI591311, AI920968, AI682841, AI866751, |
| | | | | | AL036802, AW169653, AI610645, AI537303, |
| | | | | | AI445025, AW020693, AL038778, |
| | | | | | AW089572, AI439478, AI271786, AI828731, |
| | | | | | AI572787, AL036631, AI282281, AW075351, |
| | | | | | AI539153, AW086113, AI869367, |
| | | | | | AW148320, AI340627, AL038605, |
| | | | | | AW075413, AI349937, AI500077, AL135661, |
| | | | | | AI569616, AI445165, AW162071, AI634345, |
| | | | | | AL120736, F27438, AI648684, AI801325, |
| | | | | | AW008048, AI567351, AI570909, |
| | | | | | AW002342, AL038565, AA613907, |
| | | | | | AI491852, AI500706, AW085799, |
| | | | | | AW081036, AA470491, AI567612, AI250369, |
| | | | | | AI500662, AI434468, AW023590, AI925156, |
| | | | | | AI539808, AI636719, AI309401, AL041772, |
| | | | | | AW071349, AI281772, AI469532, |
| | | | | | AW075084, AA493647, AI784252, AI950664, |
| | | | | | AI340519, AI499512, AW021588, |
| | | | | | AW051258, AW117746, AI611738, |
| | | | | | AI632408, AI306613, AI308032, AI591316, |
| | | | | | AI307708, AI289937, AI362637, AI318280, |
| | | | | | AF078164, AJ000937, AL133640, I48979, |
| | | | | | I89947, S78214, I48978, A08916, AF090900, |
| | | | | | AF078844, I89931, AL122050, AF090903, |
| | | | | | AF090901, AL122093, Y16645, AF113699, |
| | | | | | AL050393, AL117457, A08913, AL122121, |
| | | | | | AF079765, AL117435, A08910, AL110196, |
| | | | | | AF113013, AL117460, AF113690, AL110221, |
| | | | | | AL050116, AL096744, U42766, AF090943, |
| | | | | | AL133075, AL050149, AF090896, AF090934, |
| | | | | | I49625, AF177401, I03321, AF106862, |
| | | | | | Y11254, AL137459, AL050146, AF146568, |
| | | | | | AF017437, AR011880, AL133560, AL133606, |
| | | | | | X82434, AL137550, Y11587, A08909, |
| | | | | | AJ238278, AL080124, AL133016, AL133565, |
| | | | | | AL049452, AF118064, AL117583, X84990, |
| | | | | | AL133557, AF125948, AL050108, AF113677, |
| | | | | | X70685, AF113019, AF113689, AL050277, |
| | | | | | AL049466, AL137527, AL049938, AL133093, |
| | | | | | AJ242859, S68736, AF104032, AF091084, |
| | | | | | AF118070, AL133080, AF113691, AF017152, |
| | | | | | AF113676, AL110225, AL117394, AL080060, |
| | | | | | AF113694, U72620, AL137557, A65341, |
| | | | | | AF111851, E07108, L31396, AF158248, |
| | | | | | AB019565, X72889, L31397, AL049464, |
| | | | | | AR059958, AF125949, AL080137, AI2297, |
| | | | | | E03348, A93016, AF118094, A77033, |
| | | | | | A77035, AL049314, X63574, AL137271, |
| | | | | | AF097996, AF026124, AF183393, AL122123, |
| | | | | | A58524, A58523, U35846, A03736, U91329, |
| | | | | | E07361, AF087943, AL049382, E02349, |
| | | | | | Z82022, AL122110, AL050024, AL049300, |
| | | | | | AL117585, AL137463, AL049283, AL049430, |
| | | | | | AL050138, AL122098, U00763, AF061943, |
| | | | | | X96540, AL137538, AL137648, U80742, |
| | | | | | X65873, AL137283, 133392, U67958, |
| | | | | | AL080127, AL133113, X93495, AL137560, |
| | | | | | A08912, Z72491, 109360, AL110197, |
| | | | | | AL050172, AF067728, AL080159, AL137521, |
| | | | | | X98834, Y09972, AR038969, I42402, E08263, |
| | | | | | E08264, AF111112, AL133072, E15569, |
| | | | | | AJ012755, S61953, U68387, 117767, |
| | | | | | AF079763, AF119337, A93350, AL133568, |
| | | | | | I26207, AL133067, E04233, AF026816, |
| | | | | | AL080074, AR000496, U39656, AL122049, |
| | | | | | AF111849, AL137429, AF003737, AL137526, |
| | | | | | AL137523, Y14314, E05822, Z37987, |
| | | | | | AL137533, AL133014, AF185576, AL133077, |
| | | | | | Y10655, AF162270, U58996, AL110280, |
| | | | | | AF000145, AL117440, U78525, AF057300, |
| | | | | | AF057299, I00734, AL137480, AL133104, |
| | | | | | AL137556, M30514, AF153205, E00617, |
| | | | | | E00717, E00778, Y07905, AL133081, |
| | | | | | AJ006417, AR038854, L30117, A90832, |
| | | | | | AF106827, AF210052, AF061573, AR013797, |
| | | | | | AL137478, E08631, AF091512, AF100931, |
| | | | | | AL137476, U49908, X62580, U96683, |
| | | | | | AL137294, AL122111, A07647, I09499, |
| | | | | | AL133098, A45787, AF008439, I66342, |
| | | | | | AL137705, AF081197, A08911, AL122118, |
| | | | | | AL117432, L19437, AL137529, E12747, |
| | | | | | Y10080, X87582, AL137292, U88966, |
| | | | | | AF126247, AF132676, and AF061836. |
| HBXBG65 | 228 | 932780 | 1-521 | 15-535 | R36281, AF094480, and AF094479. |
| HMVDZ78 | 229 | 938574 | 1-236 | 15-250 | AB002313. |
| HE8PB92 | 230 | 1229537 | 1-4137 | 15-4151 | AI879963, AI189299, AW051858, AI878977, |
| | | | | | AI479758, AL045453, AW271337, |
| | | | | | AW160411, AW162028, AI149405, |
| | | | | | AI968340, AW303452, AI815661, |
| | | | | | AW377804, AI569274, AI807283, AI023506, |
| | | | | | AI471357, AW369109, AW368453, |
| | | | | | AW368509, AW368450, AI422763, |
| | | | | | AI015868, AI799169, AI682722, AI635546, |
| | | | | | AL119774, AA777405, AA406166, |
| | | | | | AA669754, AA033817, AA709153, |
| | | | | | AA961549, H29085, T67993, AI201745, |
| | | | | | AI654569, AI088711, AA411138, AA292424, |
| | | | | | AI207055, W96116, AA029272, AI687486, |
| | | | | | AI018823, AI655062, AI537447, AI422760, |
| | | | | | H10418, AL039715, AA782413, AI879479, |
| | | | | | AA291879, AI249192, AI355951, AA972123, |
| | | | | | AI148900, AA528040, AA007683, M247713, |
| | | | | | AA524851, AW207087, AA031831, |
| | | | | | AA126830, W96117, AA031830, W46590, |
| | | | | | AW132109, H10419, AA291559, H97172, |
| | | | | | AA182652, AW205819, AI278462, N66629, |
| | | | | | AA470856, AI198439, AI041366, AA120826, |
| | | | | | AW368514, AA460566, AA182613, |
| | | | | | AA182762, AI699804, AA120827, AA461491, |
| | | | | | AW080497, AA348783, R99753, AW043877, |
| | | | | | AA182545, AW439115, T68139, H02488, |
| | | | | | AA182642, AI250641, F00043, AA182686, |
| | | | | | T16457, AA007684, AA009429, W76085, |
| | | | | | AA127312, AI631507, W72240, AW206125, |
| | | | | | H97171, AA182659, H02489, AI382416, |
| | | | | | AI908902, T28762, AI370801, F08541, |
| | | | | | AA182737, AI419101, F00518, AA009430, |
| | | | | | AA676983, AI419110, W46589, AI419592, |
| | | | | | AI686493, R99931, F04751, H28980, |
| | | | | | AA126315, AL039716, AI908897, AI189298, |
| | | | | | AW361233, C00266, AA854372, AA366673, |
| | | | | | N84974, AI961383, L24389, M37712, and |
| | | | | | M88565. |
| HSDHB12 | 231 | 941973 | 1-624 | 15-638 | AA447298. |
| HE8UL90 | 232 | 942749 | 1-775 | 15-789 | D80247, D80022, D51060, D80195, D58283, |
| | | | | | D80043, D80391, D59787, D80196, D59467, |
| | | | | | D80522, D57483, C14389, C14331, D80439, |
| | | | | | D80253, D80302, D59889, D80166, D59619, |
| | | | | | D80210, D80164, D80240, D59859, D59502, |
| | | | | | C14014, AA305409, D51423, D51799, |
| | | | | | D59275, D80038, D80227, D80366, D51022, |
| | | | | | D81026, D81030, C06015, D80212, D80219, |
| | | | | | D80269, D80268, D80188, D80248, D50979, |
| | | | | | D50995, D80024, D59927, C15076, |
| | | | | | AA514186, AA305578, D80133, D59610, |
| | | | | | D80193, D80045, D80157, AA514188, |
| | | | | | T11417, AW360811, D80378, D51103, |
| | | | | | C14429, AW177440, D80251, D51759, |
| | | | | | C75259, D80241, AW178893, C03092, |
| | | | | | D59653, H67866, T03269, AW377671, |
| | | | | | AW375405, D45260, H67854, AA809122, |
| | | | | | AI525923, AW366296, AW178906, |
| | | | | | AW360844, AW360817, C05695, AW179328, |
| | | | | | C14227, T48593, D60010, AW375406, |
| | | | | | AW378534, AW179332, AW377672, |
| | | | | | AW179023, AW178905, D59373, AW177731, |
| | | | | | AW378528, AW178762, AW179019, F13647, |
| | | | | | AW378532, D80014, D51221, T03116, |
| | | | | | AW177501, C14344, AW177511, AW352170, |
| | | | | | D58246, AW360834, D80258, D81111, |
| | | | | | AI525917, AW179020, D59503, D59317, |
| | | | | | AW179024, D80064, AW377676, AW352171, |
| | | | | | D80168, AW378533, C14973, AW178907, |
| | | | | | AW178908, Z33452, AW177505, AW178980, |
| | | | | | D59474, D51250, AW177733, AI535686, |
| | | | | | AW360841, AW352120, AI525920, |
| | | | | | AI525227, AI557774, AA514184, AW178775, |
| | | | | | C14046, AW367950, AW178909, AW177456, |
| | | | | | C14407, C14957, AW179004, D59551, |
| | | | | | D58101, AW179329, AW176467, AW178986, |
| | | | | | AW178914, AW178774, AW178754, |
| | | | | | AW179018, AW352158, AW352117, |
| | | | | | AI525242, D60214, AI525235, AI557751, |
| | | | | | AW179009, AW179012, C16955, AW178911, |
| | | | | | AW378543, AW378525, AW378540, |
| | | | | | AW177722, AW352163, AW177734, |
| | | | | | AI525912, T02974, AA285331, H67858, |
| | | | | | AI525925, AI525215, AW378539, |
| | | | | | AW177728, D59695, Z21582, D45273, |
| | | | | | D80949, D59627, D51213, AW378542, |
| | | | | | C05763, F13796, AI525222, C04682, |
| | | | | | AW178781, AW360855, C14077, AI525237, |
| | | | | | AI910186, C14298, D51053, AI905856, |
| | | | | | I02868, AW369651, Z30160, C13958, |
| | | | | | AI525928, D80314, AA305720, D51231, |
| | | | | | D31458, D50981, N66429, AI525228, |
| | | | | | AI525216, AW177508, AW177497, T03048, |
| | | | | | AI525238, AI535961, AI535959, AF154671, |
| | | | | | A62300, AF058696, AR015138, AB002449, |
| | | | | | A82595, AR060385, A84916, A62298, |
| | | | | | AB028859, AJ132110, AR008278, I50126, |
| | | | | | I50132, I50128, I50133, AR054175, |
| | | | | | AR016514, I14842, X67155, AR060138, |
| | | | | | A45456, Y17188, A94995, D26022, A26615, |
| | | | | | AR052274, Y12724, A25909, AR066488, |
| | | | | | Y17187, Y09669, A43192, A43190, |
| | | | | | AR038669, A67220, D89785, A78862, |
| | | | | | D34614, AR008443, AIR066487, A30438, |
| | | | | | A63261, AR008277, AR008281, AR062872, |
| | | | | | A70867, D88547, AR016691, AR016690, |
| | | | | | U46128, D50010, AR008408, A64136, |
| | | | | | A68321, X82626, I79511, X68127, D13509, |
| | | | | | AR025207, AR060133, AF123263, X72378, |
| | | | | | and AR032065. |
| HTXAA15 | 233 | 1200485 | 1-2541 | 15-2555 | AA814365, AA648502, H11953, R20002, |
| | | | | | AA746117, H06599, AA374468, and |
| | | | | | W60570. |
| HOFMP09 | 234 | 1194840 | 1-1346 | 15-1360 | AI096506, AI688979, AW088625, AI623455, |
| | | | | | AI378021, AW089731, AI334787, |
| | | | | | AW148926, R54862, AI744763, AW102888, |
| | | | | | AW072414, AI061201, R54001, N59116, |
| | | | | | T53386, R52267, AI565144, AA477654, |
| | | | | | AI886419, AW089470, AI804837, AA402646, |
| | | | | | R53118, AI887407, AI830659, AA479843, |
| | | | | | AI653791, AA394269, AW193891, AI684263, |
| | | | | | AI499132, AI887289, AW194324, AA291585, |
| | | | | | H24954, AI432124, R73552, AI653885, |
| | | | | | AI873571, AA633384, AW150649, AI870177, |
| | | | | | AW028475, AI873999, AI538811, AI524776, |
| | | | | | AW243859, AI684209, AI525964, R47936, |
| | | | | | AA476975, AW103389, AI288000, |
| | | | | | AA430383, AA410602, AA293640, |
| | | | | | AW130914, AI914715, AA236709, |
| | | | | | AW439076, AI538248, AA479720, AI524589, |
| | | | | | AA411455, AA477340, AW338545, |
| | | | | | AW438957, AI283299, AI689706, AA426533, |
| | | | | | AA757345, AI241778, AA428332, AA290786, |
| | | | | | AA430560, AI918551, AI345347, AI345416, |
| | | | | | AI345612, AI345415, AI648684, AI591415, |
| | | | | | AW129264, AI280561, AI859464, |
| | | | | | AW105601, AA464646, AI801602, |
| | | | | | AA433977, AI587606, AI682798, AI784028, |
| | | | | | AI865320, AI468872, AI280661, AI699011, |
| | | | | | AA367777, AI583054, AI610645, AI439443, |
| | | | | | AA804614, AI539153, AW161202, |
| | | | | | AW450212, AL039086, AI677797, |
| | | | | | AW102900, AA7L13354, AI874151, H92687, |
| | | | | | AI886055, AW268122, AI633419, AL041115, |
| | | | | | AI270099, AW198075, AW020419, |
| | | | | | AI610667, AW082532, AI800464, AI494201, |
| | | | | | AI886594, AI680498, AI537617, AW089006, |
| | | | | | AW409775, AI570966, AI554343, |
| | | | | | AW163823, AA768725, AI805688, N27632, |
| | | | | | AL038445, AW168503, AA761557, |
| | | | | | AW021091, AI872148, AI590118, AI919593, |
| | | | | | AI744768, AI678446, AW275299, AL039276, |
| | | | | | H89138, AI636619, AI863665, AI696819, |
| | | | | | AI680280, AW088899, AW020397, |
| | | | | | AI336575, AW193467, R41605, AA568405, |
| | | | | | AW029533, AW169604, AW193125, F37471, |
| | | | | | AW089275, AA580663, AI287446, AI537075, |
| | | | | | AL040011, AW085786, AI475270, |
| | | | | | AW265004, AL079728, AW151034, |
| | | | | | AW023338, AI568138, AI955945, AI345477, |
| | | | | | AI285448, AI254226, AL119791, AI624529, |
| | | | | | AI918554, AI078510, AA603709, AI916419, |
| | | | | | AI348914, AI921442, AI419650, AI335426, |
| | | | | | AI348777, AI631107, AW051088, N71180, |
| | | | | | AW083750, AI917963, AI961589, AI288285, |
| | | | | | AI766348, AA744557, AI890507, AI690748, |
| | | | | | AW059828, AI630927, AL037582, |
| | | | | | AW194441, N75771, AL037602, AI251221, |
| | | | | | AI279628, AI744279, AI873638, AW162189, |
| | | | | | AI348901, AW026630, AI345688, AI933992, |
| | | | | | AW084097, AI866820, AI684145, AA493923, |
| | | | | | AI365256, AI857296, AW151136, AI868163, |
| | | | | | AI561356, AA494+67, AW263808, AI559599, |
| | | | | | AI538850, AW163834, AL119399, AI345608, |
| | | | | | AL040243, X83425, AF221507, AF158248, |
| | | | | | AL137555, AL080127, AR029490, AF113676, |
| | | | | | E03348, AL137557, E03349, U91329, |
| | | | | | AL050024, X06146, Z82022, AL050138, |
| | | | | | AL110171, AL049466, X63162, AL122098, |
| | | | | | AL133014, AL050277, AF176651, AI8777, |
| | | | | | AL049452, A08916, AR068751, AC002467, |
| | | | | | AF036941, I89947, I48978, A08913, E01314, |
| | | | | | AR038854, AIF047716, S77771, A08912, |
| | | | | | A08910, I89931, A08909, Y11587, AL133619, |
| | | | | | E01614, E13364, I49625, AF118094, A65341, |
| | | | | | AF162270, AL110196, A08908, AF199027, |
| | | | | | AJ242859, U96683, Y10080, E02221, S76508, |
| | | | | | AF113689, AR038969, AF113699, U90884, |
| | | | | | AR059958, AB007812, AL117629, |
| | | | | | AL117440, I89934, AF100931, X93495, |
| | | | | | AL133104, X79812, AF118070, Y11254, |
| | | | | | AL137478, E01812, AL050172, AF082324, |
| | | | | | AF026124, AF061795, AF151685, AL133016, |
| | | | | | AL137658, AL137527, AL117432, AL110222, |
| | | | | | AL137521, AL137665, AJ012755, U72620, |
| | | | | | X72889, AF003737, L30117, Y08769, |
| | | | | | AL122118, AL133072, U95114, U92068, |
| | | | | | X00861, U49434, AF090886, AF061573, |
| | | | | | AL137300, AR013797, AL117583, U87620, |
| | | | | | X83508, AF169154, AF028823, A65340, |
| | | | | | AL133640, E06743, AL110221, AL117578, |
| | | | | | S69510, S68736, AF146568, AL133565, |
| | | | | | I89944, AL050159, A08907, E04233, |
| | | | | | AF065135, AL122106, I17544, AL137273, |
| | | | | | AF106657, AF030513, AL080074, AL049300, |
| | | | | | AF111851, D83989, U77594, AF185576, |
| | | | | | AL050155, E15569, AF067790, AL049460, |
| | | | | | AL133645, I03321, AL050116, AIF058921, |
| | | | | | AF125949, AL137550, AL050170, X70514, |
| | | | | | AL137537, AI5345, AF026816, AL080124, |
| | | | | | A21103, AL122110, S75997, S36676, |
| | | | | | AR000496, I33392, U39656, I42402, |
| | | | | | AL117649, J05032, AL133075, I09499, |
| | | | | | AL137256, AL137547, A12297, AL137480, |
| | | | | | AB029065, AL080163, AL122121, AF032666, |
| | | | | | AL110280, AL137476, X53587, AL137459, |
| | | | | | L19437, X70685, AF215669, AL133080, |
| | | | | | X98834, AL137574, Y14314, AR059883, |
| | | | | | AF205861, AL023657, AF061981, U78525, |
| | | | | | AL080148, AF139986, AL096751, AL137548, |
| | | | | | AF102578, AF057300, AIF057299, AF017437, |
| | | | | | X80340, AF017790, X92070, Z37987, I30339, |
| | | | | | I30334, AL133606, I67632, AL137463, |
| | | | | | AL080060, A52563, AL117648, X72387, |
| | | | | | AL117416, AF153205, AF094480, A45787, |
| | | | | | D16301, AL050092, AF137367, AF000145, |
| | | | | | AF081197, AF081195, AF113013, E01573, |
| | | | | | E02319, AF111112, AF078844, U42031, |
| | | | | | AF091084, AL137429, AF110329, AF114170, |
| | | | | | AF126247, AL137526, AF118064, AF183393, |
| | | | | | X52128, AL133624, AL137538, AL080234, |
| | | | | | AL080158, AF000301, AL137711, AL137292, |
| | | | | | I48979, AL049465, U88966, A08911, I22272, |
| | | | | | S61953, X63410, AR020905, Y16258, |
| | | | | | AF113019, X82434, U54559, and AL122049. |
| HFPEL47 | 235 | 1143388 | 1-1963 | 15-1977 | AJ243874, and AL031575. |
| HFIHF63 | 236 | 1137853 | 1-2029 | 15-2043 | AI127432, AA010826, AA147500, AI127523, |
| | | | | | W95509, AW182823, AI383344, AA625557, |
| | | | | | AI420515, AI378016, AI669104, AA147929, |
| | | | | | AA234759, AI864152, AW297177, W95412, |
| | | | | | AA011202, AA782437, AI869000, AI702739, |
| | | | | | AI027151, C02468, AA889785, AA450119, |
| | | | | | and AI291551. |
| HCE1I41 | 237 | 1156227 | 1-2145 | 15-2159 | AI769814, AI332304, AI435407, AI568859, |
| | | | | | AA716223, H23117, AI470931, AI769160, |
| | | | | | H23116, T15752, T16288, R71701, R19556, |
| | | | | | T33015, R43906, T27055, AA077185, |
| | | | | | AA223802, AA349536, AA224351, and |
| | | | | | AC008039. |
| HHAUD86 | 238 | 1195748 | 1-1912 | 15-1926 | AA477213, AA929049, AI246790, AI817726, |
| | | | | | AA477264, AI090213, AI040006, AI625881, |
| | | | | | AA327819, AI042113, AI624098, AI653458, |
| | | | | | AI887475, AI751773, AW264080, AI758930, |
| | | | | | AI796494, AI146845, N26216, AI796630, |
| | | | | | AI039881, F30814, AI688562, AI278769, |
| | | | | | M751774, AI082861, W73303, AI185324, |
| | | | | | D63205, AI081463, AA115144, AI660724, |
| | | | | | AA775566, AI368115, W73038, AI401254, |
| | | | | | AA775270, AA334737, AI089662, AA776836, |
| | | | | | AA804859, AA775860, AI039841, AI910517, |
| | | | | | AA774463, F36581, W45177, AI129600, |
| | | | | | AI246469, R70622, M399916, AI750917, |
| | | | | | R72411, AI217429, AA769804, AA421770, |
| | | | | | AI468412, R70456, H39900, R70522, |
| | | | | | AA852390, AW439978, AA039500, |
| | | | | | AW028386, AI127154, AI122975, R73276, |
| | | | | | AI081861, AA530998, AA992235, R72825, |
| | | | | | R72450, R69467, W92952, AI927256, |
| | | | | | AA037484, W16559, AA115367, AI092399, |
| | | | | | W45082, W92953, AI263350, AA908436, |
| | | | | | AA568530, AA037563, AI184469, |
| | | | | | AW273646, R48676, AA039499, AI244856, |
| | | | | | AA129903, AA129904, AW439903, |
| | | | | | AA644176, AA853860, AI042566, AI016097, |
| | | | | | AI494579, AA776612, AI904995, AW170175, |
| | | | | | AA733145, AI201332, AI608936, AI632408, |
| | | | | | AI886753, AI819976, AI584140, AI280637, |
| | | | | | AI702433, AI491897, AI818980, AI382201, |
| | | | | | AI434468, AL036146, AI541056, AW149869, |
| | | | | | AW081036, AW198068, AI269205, |
| | | | | | AI620003, AI679174, AW150453, AI800384, |
| | | | | | AI624206, AI637584, AI538716, AI611738, |
| | | | | | AI559296, AI955917, AI862139, AW132056, |
| | | | | | AI696612, AI274508, AI890833, AI926790, |
| | | | | | AI564719, AI281772, AI889376, AI620284, |
| | | | | | AI524671, AI926367, AW051258, AI921248, |
| | | | | | AI619502, AI677796, AI802542, AI933589, |
| | | | | | AW026882, AI433157, AI702073, AI796743, |
| | | | | | AI866751, AL079963, AI475394, AW079075, |
| | | | | | AI633125, AI446373, AW008048, AI872545, |
| | | | | | AI439350, AW104724, AI431975, AL119863, |
| | | | | | AW117746, AI866780, AI499285, AI783504, |
| | | | | | AI349004, AI362637, AW118518, AA279293, |
| | | | | | AW268220, AW080327, AI872711, |
| | | | | | AW080090, AI567935, AI493248, AI648509, |
| | | | | | AI286256, AI634751, AW301505, AI590227, |
| | | | | | AL045500, AI345587, AI289937, AI922215, |
| | | | | | AL045266, AL039086, AI499381, AI287489, |
| | | | | | AI537244, AI516010, AW149227, AI476046, |
| | | | | | AI554485, AI491775, AI345416, AI345612, |
| | | | | | AI627360, AI818977, AA508692, AI873644, |
| | | | | | AI611354, AI687728, AI934259, AI432969, |
| | | | | | AI682841, AI280521, AI521040, AI445432, |
| | | | | | AI476109, AI815232, AI435641, AW198090, |
| | | | | | AI335426, AI348777, AW166903, AL036802, |
| | | | | | AI554818, AI610307, AI801325, AW002362, |
| | | | | | AI500523, AL121286, AI932794, AW103371, |
| | | | | | AI702068, AW086113, AI285735, AI536638, |
| | | | | | AI306613, AW183130, AI521560, AI922901, |
| | | | | | AI569583, AI500662, AI623396, AI619749, |
| | | | | | AI932510, AI284484, AL047763, AI634737, |
| | | | | | AI254731, AI538829, AI439443, AW076093, |
| | | | | | AW104827, AI445025, AL050202, X82434, |
| | | | | | I89947, AL117435, I48979, A08913, |
| | | | | | AF090934, AIF091084, AL080124, AF113677, |
| | | | | | I48978, A08916, X84990, AF090903, A08910, |
| | | | | | I89931, AL137550, I49625, AF183393, |
| | | | | | AL049382, AJ000937, AL133640, Z82022, |
| | | | | | E02349, AL133075, AF090901, Y11254, |
| | | | | | AL110196, AL117460, AL133560, AF090900, |
| | | | | | AF158248, AL050149, X63574, E03348, |
| | | | | | AF113691, AL133016, AL133113, AF113690, |
| | | | | | I03321, AL050393, AL050277, AF113699, |
| | | | | | E07108, AR059958, AL049938, A65341, |
| | | | | | AF017437, AL133093, A77033, A77035, |
| | | | | | AL110221, AL117457, AF177401, AF113019, |
| | | | | | Y11587, A08909, AL050108, AL049452, |
| | | | | | AL137271, AL080060, AL122121, AR011880, |
| | | | | | S78214, AL049466, AF106862, AF104032, |
| | | | | | AL050116, AF125948, AB019565, AF113694, |
| | | | | | Y16645, AL137557, AL133080, AL117583, |
| | | | | | AF090896, AF079765, A58524, A58523, |
| | | | | | AJ238278, AF113676, AL110225, AF113689, |
| | | | | | AF146568, AL133565, AL050138, AL049464, |
| | | | | | AF113013, S68736, AF078844, AF111851, |
| | | | | | AL137459, AJ242859, Y14314, AL122093, |
| | | | | | U42766, AF090943, AF118064, AF118070, |
| | | | | | AL049314, AL117585, AL133557, AF017152, |
| | | | | | AF125949, AL122050, L31396, AL050146, |
| | | | | | AL080137, AL117394, AL137527, AL133606, |
| | | | | | L31397, AL122123, E07361, A93016, |
| | | | | | AL050024, I33392, AL049300, AF118094, |
| | | | | | AL137463, AF087943, A03736, X72889, |
| | | | | | AL049283, AL122098, AL096744, U35846, |
| | | | | | U91329, AL049430, U00763, A08912, |
| | | | | | AL137283, AL122110, AL137538, U80742, |
| | | | | | AI2297, AF097996, X70685, AL080159, |
| | | | | | U72620, AL137648, AF026816, X98834, |
| | | | | | X96540, X65873, AL080127, X93495, |
| | | | | | AL110197, AF061943, AF067728, AJ012755, |
| | | | | | U67958, AL137560, I09360, A93350, |
| | | | | | AR000496, U39656, I42402, AL137521, |
| | | | | | E08263, E08264, AL133072, E15569, |
| | | | | | AL110280, AR038969, AF111112, AF119337, |
| | | | | | AR038854, AL137523, I26207, AF153205, |
| | | | | | AL133014, AF079763, AL133568, AL050172, |
| | | | | | AF185576, AF026124, A45787, Y09972, |
| | | | | | AL133077, AF057300, AF057299, AF000145, |
| | | | | | Y07905, AL137480, AL122049, AL137533, |
| | | | | | AL133104, Z37987, A08911, AL137556, |
| | | | | | AL137526, AF111849, AJ006417, AL137476, |
| | | | | | E05822, AL122111, AF106827, AL133098, |
| | | | | | AF003737, AL080074, I17767, I00734, |
| | | | | | S61953, E00617, E00717, E00778, Z72491, |
| | | | | | A07647, U58996, AL133067, L19437, |
| | | | | | AL117440, AF030513, U88966, X87582, |
| | | | | | AF162270, I66342, AL137705, AC006371, |
| | | | | | AL137294, U68387, AF061573, AF008439, |
| | | | | | M30514, U96683, AL137292, U49908, |
| | | | | | AL137478, AF118090, Y10655, E04233, |
| | | | | | L30117, AF051325, A90832, E08631, |
| | | | | | AL023657, AL080148, AR013797, AF069506, |
| | | | | | D83032, AF095901, AL137429, AF132676, |
| | | | | | AF061836, AF061981, E12747, X83508, |
| | | | | | AL133081, and AL122118. |
| HFKKE19 | 239 | 947418 | 1-276 | 15-290 | D87469, AL031597, AL157901, and |
| | | | | | AL356389. |
| HLWAR77 | 240 | 947484 | 1-1275 | 15-1289 | AA449919, AA449920, and AF119815. |
| HWAFW39 | 241 | 1217787 | 1-3297 | 15-3311 | AA694391, R07065, T27258, AA397568, |
| | | | | | AI382296, AA399529, AA996049, AL120058, |
| | | | | | R07488, AA569667, AA582073, AA507822, |
| | | | | | AI056177, AA581247, AA452887, AI251591, |
| | | | | | AA604645, AL079734, AA084609, AI829174, |
| | | | | | AI254913, AA579205, AA524229, AA630854, |
| | | | | | AA837686, N32944, AA701080, AI280504, |
| | | | | | AI291309, AA228778, C15363, F28845, |
| | | | | | AA508809, AI783911, AA744018, AA714288, |
| | | | | | T41115, AI254779, AA213959, AL119247, |
| | | | | | H58354, AI370512, AI419337, AA503018, |
| | | | | | AW188742, AA584862, T39169, AA557982, |
| | | | | | AA659324, AA845848, AA558814, AI440117, |
| | | | | | AW265279, AI049676, AA665181, AI361900, |
| | | | | | AA904275, AA904137, N64587, AA019804, |
| | | | | | W45306, AA018207, AW023662, AA828592, |
| | | | | | AW302017, H96249, AA829036, H11612, |
| | | | | | AI569363, AA715173, AA114077, AA715075, |
| | | | | | AA598954, F08248, AF106037, AF222340, |
| | | | | | AB011097, AF183569, AC005519, U91321, |
| | | | | | AC004655, AC005004, AC000087, |
| | | | | | AC006581, AL031587, AP000555, AP000493, |
| | | | | | AP000967, AL022721, Z93023, AC004150, |
| | | | | | AL022238, AC007999, AC003665, |
| | | | | | AC004707, AC005017, AC006965, |
| | | | | | AC004910, AC004685, AL049569, |
| | | | | | AL035683, AF111168, AL049757, AC006013, |
| | | | | | AC010200, U47924, AC005778, AL031295, |
| | | | | | AL035400, AF200465, AC005726, AC016831, |
| | | | | | Z98742, AC005874, AF134471, AC003104, |
| | | | | | AC007298, AL031255, Z82244, AC005003, |
| | | | | | AL035455, U80017, AC004878, AC009516, |
| | | | | | AC002316, AC004583, AL049869, |
| | | | | | AL009181, AC004098, Z96074, AC002558, |
| | | | | | AC005740, AC009731, AC005934, |
| | | | | | AC004921, AC005242, AC006953, |
| | | | | | AC007021, AC003101, AF001550, |
| | | | | | AC002425, AC005031, AL031848, U52112, |
| | | | | | AL023807, AC000025, AF001548, AF091512, |
| | | | | | AC007938, Z93930, AC004953, AC005495, |
| | | | | | AC007216, AC005527, AC006597, |
| | | | | | AP000045, AL035685, AC006538, AP000117, |
| | | | | | AL132992, AC005049, Z84487, AL096701, |
| | | | | | U85195, AL121658, AC000026, Z97054, |
| | | | | | AP000252, AC005523, AL049766, Z84466, |
| | | | | | AC002301, AL035079, AC004832, |
| | | | | | AD000092, U91326, AC005632, AC004966, |
| | | | | | AC005900, AL096791, AC003684, |
| | | | | | AC016025, AF129756, AC005940, AL022163, |
| | | | | | AC012384, AP000079, AC002544, |
| | | | | | AC005037, AC006039, AC005952, |
| | | | | | AC007371, AF024533, AE000658, AC007227, |
| | | | | | AL034420, AC004099, AC005899, |
| | | | | | AC016830, Z97053, AC004675, Z94044, |
| | | | | | Z95113, AP000350, AC006285, AL022165, |
| | | | | | AC005207, AC005102, AF038458, |
| | | | | | AC004895, AC005606, AC004797, |
| | | | | | AC004448, AL035684, AC002350, AF088219, |
| | | | | | AC005411, AC004386, AC004596, |
| | | | | | AC007637, AL117258, AP000553, AF001549, |
| | | | | | AL109827, AC007541, AP000692, U62317, |
| | | | | | AC003689, AC009509, AL133355, |
| | | | | | AC005702, AF196969, AC005839, |
| | | | | | AC004000, AC004821, AP000115, U07562, |
| | | | | | AC005391, AL031602, AL034423, |
| | | | | | AC006537, AL020997, AC007193, |
| | | | | | AL117354, AC005920, AL096712, AP000558, |
| | | | | | AC004815, AC004841, AC002300, |
| | | | | | AC005041, AL035555, AC006312, |
| | | | | | AC002044, AC000090, AC005091, Z99716, |
| | | | | | AJ003147, AD000812, Z93017, AC002365, |
| | | | | | AP000247, AC005544, AL031276, AP000L12, |
| | | | | | AC002314, AC005104, AP000704, AL050321, |
| | | | | | AC005514, Z98941, AL009172, AC005387, |
| | | | | | AL050332, AP000689, Z85996, AC007687, |
| | | | | | AL024498, AC002299, AC005875, |
| | | | | | AC002126, AJ011930, AL133312, AC004104, |
| | | | | | AF205588, Z94056, AC002115, AC004876, |
| | | | | | AC004805, AC004859, AL050318, |
| | | | | | AC004485, AL133289, AC005844, AP000697, |
| | | | | | AP000313, U95742, AC007546, AC005747, |
| | | | | | AL035072, AL035411, AC002511, AL021391, |
| | | | | | U89335, AC007308, AC002059, Z82178, |
| | | | | | AL031774, AC005482, AC003982, Z86090, |
| | | | | | AC006014, AC007226, AC006571, |
| | | | | | AC004383, Z95118, AL031597, AC005666, |
| | | | | | AL022336, AL080243, AP000152, Z98044, |
| | | | | | AC003036, and AC005881. |
| HBCBF11 | 242 | 1204933 | 1-1934 | 15-1948 | R67750, AW118248, H12807, R66136, |
| | | | | | AI016321, N47721, AI866708, AA148713, |
| | | | | | AC005015, AC005081, AC005049, |
| | | | | | AC005264, AC004526, AC003101, |
| | | | | | AC002288, AC006512, AC004895, |
| | | | | | AC004953, AC004638, AF049895, Z97054, |
| | | | | | AF030876, AC018633, AC007842, AL031728, |
| | | | | | AC005829, AL121748, Z69732, Z95115, |
| | | | | | AF031078, AC005222, AL034412, AC006449, |
| | | | | | AC006965, AC004612, U47924, AC006362, |
| | | | | | AL031311, AC005841, AC006344, |
| | | | | | AC003684, AC004834, Z95116, AL009172, |
| | | | | | AC007298, AC007157, AC005913, |
| | | | | | AC006530, Z85987, AL109627, AC005828, |
| | | | | | AC007687, AC006946, AC005736, Z99128, |
| | | | | | AC004601, AL049795, AC005924, |
| | | | | | AC007685, AL035410, and AL117352. |
| HHFME38 | 243 | 947970 | 1-629 | 15-643 | AC004616, AC011307, AC011307, |
| | | | | | AC004616, AC011302, and AC011302. |
| HBJHS02 | 244 | 1156166 | 1-1630 | 15-1644 | AW205367, AW402801, N24246, AI654541, |
| | | | | | N28316, N38941, AW383418, AW383426, |
| | | | | | AI276242, AA215300, N33010, AW383396, |
| | | | | | AA458944, N20230, AI439520, AW402242, |
| | | | | | W03476, N25452, AA459158, AW383428, |
| | | | | | N30453, N21241, AI760983, N20533, |
| | | | | | N73074, AI434284, N72999, N20563, |
| | | | | | AW403946, N67502, AI470743, AA837208, |
| | | | | | AW407871, H84381, AW404443, N29316, |
| | | | | | N26470, AI864746, H98912, H84382, |
| | | | | | N35519, H99497, W02963, AW403434, |
| | | | | | W02298, N46511, AA761778, N71796, |
| | | | | | AI222330, N29315, AW402824, N28949, and |
| | | | | | AW402928. |
| HCE3J64 | 245 | 1216650 | 1-1652 | 15-1666 | AI951872, AW305020, R38978, AI094942, |
| | | | | | AA448371, AA448777, H46357, AW341249, |
| | | | | | AB011176, and U27341. |
| HFKHD91 | 246 | 1129627 | 1-1349 | 15-1363 | AI858128, AA422028, W74456, AI524577, |
| | | | | | W79191, and AB023193. |
| HDAAN31 | 247 | 1204979 | 1-1744 | 15-1758 | AA620978, AI419965, AI635561, AI695908, |
| | | | | | AI123457, AA927259, AA489964, AA401729, |
| | | | | | AW104724, AL036146, AI269205, AI432969, |
| | | | | | AW132034, AW151485, AW008048, |
| | | | | | AI673710, AI274541, AW087445, AI349937, |
| | | | | | AI580984, AI445025, AI538829, AW149869, |
| | | | | | AI536638, AI783504, AI620284, AI682841, |
| | | | | | AI637584, AI538716, AI802542, AI564719, |
| | | | | | AI758437, AL036396, AW074993, AI349614, |
| | | | | | AI524671, AI343112, AI349645, AI619502, |
| | | | | | AW268253, AI349598, AI312152, |
| | | | | | AW026882, AI345735, AI281762, AI307708, |
| | | | | | AI433157, AI349772, AA508692, AI500523, |
| | | | | | AI349004, AI284484, AW071417, AI627360, |
| | | | | | AI538259, AI625079, AL044207, AI590128, |
| | | | | | AW169671, AI340582, AL045500, AL119049, |
| | | | | | AI282281, AI636456, AL047763, AI634737, |
| | | | | | AI554818, AW071349, AI800453, AI800433, |
| | | | | | AI271786, AI440239, AI683585, AI872711, |
| | | | | | AI590227, AI871697, AI568855, AI648684, |
| | | | | | AI309401, AI635461, AI624206, AL036361, |
| | | | | | AI439717, AI925196, AI349256, AI815855, |
| | | | | | AI926790, AI869367, AI349933, AW268220, |
| | | | | | AW103371, AI521012, AI281837, AI921248, |
| | | | | | AI334884, AI348897, AW183130, AL040243, |
| | | | | | AI445432, AI273142, AI345253, AW301409, |
| | | | | | AL047042, AI702073, AI290154, AW169653, |
| | | | | | AI249323, AI567612, AL042753, AL036802, |
| | | | | | AI560099, AW075413, AI673297, AI284020, |
| | | | | | AI800384, AI678302, AW129171, AI597750, |
| | | | | | AI568870, AI630928, AI499463, AW090013, |
| | | | | | AW274192, AI249257, AL045266, AL043326, |
| | | | | | AI636445, AW118512, AW131954, |
| | | | | | AW196141, AI612920, AI554484, AI538790, |
| | | | | | AI283941, AL135661, AI610756, AI811344, |
| | | | | | AI912866, AI275175, AI702406, AI281779, |
| | | | | | AI570384, AI857296, AW002342, AI440426, |
| | | | | | AI475451, AI569616, AI702433, AI224992, |
| | | | | | AI799199, AI572787, AW075351, AI686877, |
| | | | | | AI687728, AI349226, AI269696, AW148320, |
| | | | | | AI868831, AL038605, AI500077, AI633419, |
| | | | | | AI498579, AI445165, AI866002, AI433976, |
| | | | | | AI922901, AI828731, AI281773, AI567128, |
| | | | | | AW117882, AW087462, AI610645, |
| | | | | | AI567351, AI697137, AW238730, AL038565, |
| | | | | | AI609593, AW080327, AI862144, AI631107, |
| | | | | | M636719, AI539153, AW150578, |
| | | | | | AW168650, AI539771, AL134259, AI950664, |
| | | | | | AI866608, AW089572, AI349957, |
| | | | | | AW195969, AW086113, AI500659, |
| | | | | | AI612913, AI475371, AW068845, AI609331, |
| | | | | | AW026610, AA804740, AW005858, |
| | | | | | AW075667, AI539780, AW074869, |
| | | | | | AI754897, AI828682, AW301300, AL036274, |
| | | | | | AW148408, AI521040, AI610307, AI591311, |
| | | | | | AI920968, AW075207, AI287489, AI250293, |
| | | | | | AW129202, AW102761, AW118557, |
| | | | | | AI702068, AI818683, AI634345, AI499393, |
| | | | | | AI160954, AW149851, AW403717, |
| | | | | | AI690426, AI564992, AI571909, AI285735, |
| | | | | | AL119791, AI812107, AI569583, AI554427, |
| | | | | | AW082040, AI889376, AI537303, AI784252, |
| | | | | | AI687127, AA287231, AI537677, AI690480, |
| | | | | | AI609589, AL036631, AI687375, AW080992, |
| | | | | | AW188539, AI570009, AI668893, AI431327, |
| | | | | | AI064830, AC007023, AL050393, AL122093, |
| | | | | | I48979, I89947, AL050108, X84990, |
| | | | | | AL080124, AF113694, AL080060, AF106862, |
| | | | | | AL133640, I89931, AF090900, S68736, |
| | | | | | AF090901, AF090903, S78214, A08916, |
| | | | | | A08913, AF118064, AF113677, AF113691, |
| | | | | | AF113019, AF090934, AF113699, AL133016, |
| | | | | | I48978, AL117457, AF090943, AF078844, |
| | | | | | L31396, L31397, AL133557, AL117460, |
| | | | | | AF090896, AL110221, AL050116, AL137527, |
| | | | | | AL110196, AB019565, AF113690, AL122121, |
| | | | | | AF104032, AL049452, AJ242859, AL133075, |
| | | | | | AL050146, AF113689, AF113013, Y11587, |
| | | | | | E03348, AR059958, U42766, AF118070, |
| | | | | | AL122050, AL049314, AF017152, AL050149, |
| | | | | | AF125949, AL080137, AL133606, X63574, |
| | | | | | AL049466, AL049938, AL050277, AF113676, |
| | | | | | AL133093, AF158248, AL133565, A93016, |
| | | | | | Y16645, E07361, AL133080, AL137557, |
| | | | | | AL050138, AF111851, AL122123, AF091084, |
| | | | | | AJ000937, AL117394, AL137283, Y11254, |
| | | | | | X82434, AL137459, AL096744, AF125948, |
| | | | | | AL110225, AF079765, AF146568, A65341, |
| | | | | | U91329, I49625, AF017437, A03736, |
| | | | | | AL133560, E02349, U00763, AF177401, |
| | | | | | AL049430, AL137550, AR011880, AJ238278, |
| | | | | | A08910, A08912, AL117585, AF097996, |
| | | | | | X70685, AL049464, AL117583, Z82022, |
| | | | | | E07108, AL049300, AL117435, AI2297, |
| | | | | | AL049382, A08909, AF067728, AF183393, |
| | | | | | A77033, A77035, AL137271, A58524, |
| | | | | | A58523, AF118094, I33392, AL050024, |
| | | | | | AL137648, AL133113, I03321, X96540, |
| | | | | | AL049283, AL122098, AL122110, X65873, |
| | | | | | X72889, AL137538, AL137463, U80742, |
| | | | | | U35846, X98834, I09360, AF087943, U72620, |
| | | | | | Y09972, S61953, AC006336, AL080159, |
| | | | | | AL080127, AL110197, AL133568, U68387, |
| | | | | | X93495, AJ012755, U67958, U49908, |
| | | | | | AL137523, AF111112, AF026816, AL050172, |
| | | | | | I42402, AL137521, I66342, E08263, E08264, |
| | | | | | AL137560, AL133072, AF061943, AR000496, |
| | | | | | U39656, E15569, A93350, A08911, |
| | | | | | AF057300, AF057299, I17767, A07647, |
| | | | | | AR038969, AF119337, AF003737, AF095901, |
| | | | | | X87582, AC004690, AC004093, AF026124, |
| | | | | | Z37987, M30514, AF118090, I00734, Y14314, |
| | | | | | U95739, I26207, E00617, E00717, E00778, |
| | | | | | Y07905, AL110280, AL133104, AF185576, |
| | | | | | AL137526, AF106827, L30117, AR013797, |
| | | | | | AL133077, AL122049, AL133098, AC007390, |
| | | | | | AL133067, AR038854, E05822, Z72491, |
| | | | | | AF153205, A45787, AL133014, AC004200, |
| | | | | | L13297, U58996, AL122111, AF079763, |
| | | | | | AF100931, AF162270, AC004987, AC002467, |
| | | | | | AR054984, U78525, AL137294, AF000145, |
| | | | | | AL137556, AC004686, AL137429, AL137292, |
| | | | | | AC006371, AL137533, AL117440, AL137476, |
| | | | | | A90832, AL080074, L19437, AL035587, |
| | | | | | AF061573, AC007298, X62580, and |
| | | | | | AF111849. |
| HE8AM92 | 248 | 1162779 | 1-1948 | 15-1962 | AW195380, N23786, AI807492, AI734217, |
| | | | | | AA425224, AA634119, AI088774, AI668657, |
| | | | | | AJ805290, AI693531, W20302, AI344107, |
| | | | | | AI830204, AA071290, AI023328, AW069189, |
| | | | | | AI446315, AI764987, AI367900, AI088165, |
| | | | | | AA541267, AA779556, AA228107, AI040754, |
| | | | | | AA521303, AA552601, AA314127, R54083, |
| | | | | | AI263054, H29680, AA046045, AI870566, |
| | | | | | AA122313, AI921148, AA815201, AA884602, |
| | | | | | R60682, AA747446, AW297058, H08571, |
| | | | | | AI361541, R60683, AI284342, T66056, |
| | | | | | AA873444, AA122312, D52689, AA386170, |
| | | | | | AA399256, AW242164, R19696, R18168, |
| | | | | | F13183, Z43231, AI093433, N36074, T77025, |
| | | | | | AA151813, T65297, AA350782, AI309309, |
| | | | | | AA576719, R54134, D25599, AW004629, |
| | | | | | N46213, R36565, AI620774, T33549, |
| | | | | | AA811454, C20572, AA337811, R12223, |
| | | | | | F02683, F10790, AI421110, F03793, F12174, |
| | | | | | R34437, AA888883, AI289652, AA279402, |
| | | | | | AW105294, F07164, F08075, AI355753, |
| | | | | | H29594, AA328526, T36239, AA975250, |
| | | | | | R50027, F06393, F11810, R40964, R39944, |
| | | | | | R48971, R41712, N36942, F07553, AI244963, |
| | | | | | AA642020, AW367327, AI354930, AI092767, |
| | | | | | AW008997, R44252, R50366, AI335889, |
| | | | | | AI460092, AI766428, AA806386, AA334776, |
| | | | | | AI358493, AA331654, AA774074, R24870, |
| | | | | | F05321, F05907, AA577350, AI569329, |
| | | | | | AI273806, AI358182, F03445, F05235, |
| | | | | | R44573, F05322, N69072, F01488, |
| | | | | | AA902193, AI284343, AA046154, D61303, |
| | | | | | AI335808, AI022959, F05267, AW069641, |
| | | | | | R14569, AI471308, F01581, T24915, |
| | | | | | AA425500, T25071, AI283001, AA071293, |
| | | | | | AA984503, F02156, AA748545, T31990, |
| | | | | | F01582, F01520, AI699076, R58045, |
| | | | | | AA412231, N90680, T10067, AA169608, |
| | | | | | AW371978, AJ243721, AF182814, AI637725, |
| | | | | | AW510545, and AW518221 |
| HSXBF22 | 249 | 952744 | 1-1626 | 15-1640 | AI973128, AI459802, AI370911, AI370927, |
| | | | | | AI423465, AW207527, AI873583, R88039, |
| | | | | | R86664, AI356884, AW015789, AI460086, |
| | | | | | N46716, AI886914, and H43809. |
| HUSXE73 | 250 | 1125845 | 1-2126 | 15-2140 | AW138763, AI968244, AI671228, AI146849, |
| | | | | | AL037051, AI650986, AL042909, AL040992, |
| | | | | | AL039423, AL038531, AA974891, |
| | | | | | AL039109, AL045353, AL036973, AL039128, |
| | | | | | AL045337, AL038837, AI935406, AI375139, |
| | | | | | AL045341, AI632343, AL038025, AL044407, |
| | | | | | AL039074, AL039108, AL039386, AL039659, |
| | | | | | AL037726, AL039648, AL039625, AL039678, |
| | | | | | AI580312, AL039629, AI190358, AI823383, |
| | | | | | AL039564, AL039538, AA758662, |
| | | | | | AW166381, AI816934, AI362170, AI307616, |
| | | | | | AL039410, AI339511, AL037639, AI092493, |
| | | | | | AI193719, AA676785, AL039566, AL036196, |
| | | | | | AL037615, AL044530, AA701414, AI375073, |
| | | | | | AI077483, AL039509, AI090245, AW003931, |
| | | | | | AL036767, AL039156, AI307365, N70081, |
| | | | | | AL036238, AL037027, AI991601, AL036765, |
| | | | | | AI967935, AL043441, AI637874, AI990350, |
| | | | | | AI825545, AI621021, W67234, AL036725, |
| | | | | | AL036158, AI186726, AW206481, |
| | | | | | AW140070, N30322, AL039150, AL036117, |
| | | | | | AL037601, AL039924, AW338117, AI095704, |
| | | | | | AA031644, AI859068, AW136394, H00954, |
| | | | | | AW263085, AL036132, AI984849, |
| | | | | | AW338430, R39467, AI219050, AI334231, |
| | | | | | R62632, AI241351, AL036167, AI355851, |
| | | | | | AI334036, AL037047, AL038821, AA449686, |
| | | | | | AL036964, AI336416, H72039, AI735518, |
| | | | | | AL037054, AL037643, AL037085, AL045794, |
| | | | | | AL036679, T24119, AA699736, AL039085, |
| | | | | | AL037021, T24112, AL037177, AL134524, |
| | | | | | AW013814, AL043445, AL037104, |
| | | | | | AL038043, AL043422, AL037526, AL039076, |
| | | | | | AL037049, AL037600, AL043423, AL036924, |
| | | | | | AL036268, AL036133, R39468, H00069, |
| | | | | | F26300, AL036163, R30863, AL036733, |
| | | | | | AL036914, AI130689, AL043868, W67345, |
| | | | | | AL037742, AL036139, AL036207, AL036418, |
| | | | | | AI142134, T23947, AL036998, AL038983, |
| | | | | | T02921, AL036900, AL042898, AL037124, |
| | | | | | AW451070, AI905981, AL036152, AI906040, |
| | | | | | AI906064, AL037082, AL038851, AL037727, |
| | | | | | AL037178, AL045328, AL036190, AL039643, |
| | | | | | AI535983, AL036228, AI620138, AI535783, |
| | | | | | Z99396, AL036191, AL049018, AA358091, |
| | | | | | AW452756, AL038838, AL037436, |
| | | | | | AL036742, N74688, AL036150, AA704504, |
| | | | | | AL047012, AL037323, AL044125, AL047170, |
| | | | | | AL040463, AI524317, R47228, AL037435, |
| | | | | | AL047219, AL039432, AL044162, AL041238, |
| | | | | | AL038532, AL040193, AI183860, AL040621, |
| | | | | | AL043538, AL043496, AL040464, AI801924, |
| | | | | | AL041347, AL038822, AL047183, AL041324, |
| | | | | | AL041098, AL039077, AL044186, AL037295, |
| | | | | | AL040617, AL041096, AL040625, AL044037, |
| | | | | | AL038761, AL041163, AL048425, AL040510, |
| | | | | | AL043923, AL043814, AL045684, AL040075, |
| | | | | | AL043467, AL043845, AL044603, AL041133, |
| | | | | | AL040576, AL041752, AL041635, AL047057, |
| | | | | | AL040294, AL036953, AL040119, AL041358, |
| | | | | | AL043677, AL045753, AL040322, AL041296, |
| | | | | | AL044064, AL047037, AL040839, AL041459, |
| | | | | | AL040472, AL041577, AL040149, AL043492, |
| | | | | | AL041602, AL041346, AL042135, AL041086, |
| | | | | | AF186111, AI0361, E13740, I13349, A35536, |
| | | | | | A35537, A02135, A02136, A04663, A04664, |
| | | | | | I08051, A91965, I19517, A22413, A76773, |
| | | | | | A11245, A92636, AR035975, AR035977, |
| | | | | | AR036903, AR035974, AR035976, |
| | | | | | AR035978, AR027069, AR062871, A04710, |
| | | | | | AR017907, A95051, A02712, AR062872, |
| | | | | | I06859, AI8050, A23334, A75888, I70384, |
| | | | | | AR062873, A60111, A23633, AR007512, |
| | | | | | A52326, AI8053, A43189, A43188, A20701, |
| | | | | | V00745, AR043601, A20702, A84772, |
| | | | | | A20700, A84776, A84773, A84775, A92133, |
| | | | | | A84774, AR067731, AR067732, A91750, |
| | | | | | A58522, I60241, I60242, A02710, E12615, |
| | | | | | AR035193, A07700, AI3392, AI3393, |
| | | | | | AR027100, I28266, I21869, X73004, A70040, |
| | | | | | E03165, AR060673, AR060676, A49428, |
| | | | | | Z96142, AR028564, A08458, A08457, |
| | | | | | E02221, E01614, E13364, A51384, I01992, |
| | | | | | A00782, A02741, A14595, AI8755, A25856, |
| | | | | | I12245, AI3038, A29289, A49695, A49696, |
| | | | | | AF118808, I66498, I66497, I66496, I66486, |
| | | | | | X68127, I40851, A60983, AR022240, |
| | | | | | AR031374, A49700, AR031375, A58521, |
| | | | | | AR020969, AR025207, AR036905, A38214, |
| | | | | | A44171, I56772, I95540, AR018924, A63067, |
| | | | | | A51047, A63064, AR018923, A48774, |
| | | | | | A63072, A48775, AR068507, AR068506, |
| | | | | | AR015960, AR000007, AR015961, A85477, |
| | | | | | A85396, AJ244003, AJ244004, A25909, |
| | | | | | I66495, I66494, A98767, I19516, A93963, |
| | | | | | A93964, I63120, A95052, AR043602, |
| | | | | | AR043603, A95117, A23998, I66487, |
| | | | | | AR037157, A86792, AR054109, I18371, |
| | | | | | A58524, A58523, A64081, A24783, A24782, |
| | | | | | A81878, I03343, E14304, A27396, A97211, |
| | | | | | A49045, E16678, E16636, A82653, A93016, |
| | | | | | U87250, D28584, I25027, I26929, I44515, |
| | | | | | I26928, I26930, I26927, A58525, I49890, |
| | | | | | I44516, AF156296, AR038762, AR000006, |
| | | | | | A58526, A91753, I00079, E16590, I84554, |
| | | | | | I84553, AF156294, AR064707, AJ244005, |
| | | | | | AJ230933, Y11923, A67220, Y11926, |
| | | | | | AI5078, I00074, I03665, D88984, I03664, |
| | | | | | X16234, E00523, AR038286, I25041, I92483, |
| | | | | | I00077, AR008430, AF156303, D14548, |
| | | | | | AR066494, AF156299, I07429, I18302, |
| | | | | | M28262, X13220, D34614, A97221, |
| | | | | | AF156302, AF156304, AF019720, S70644, |
| | | | | | A18722, A91754, E06034, M32676, |
| | | | | | AB012117, I69350, AF096810, AR063812, |
| | | | | | S65373, X58217, E04616, AR064706, I68636, |
| | | | | | A60957, I62368, AR031488, I13521, I52048, |
| | | | | | I44531, A60968, I05558, Y11449, AF096793, |
| | | | | | AR066482, A60985, A60990, A60987, I48927, |
| | | | | | AR009151, D44443, I66485, R74316, |
| | | | | | AI433512, AI634964, AI933476, and |
| | | | | | AI933484. |
| HNFCS26 | 251 | 899406 | 1-1687 | 15-1701 | H70763, AW376414, AW403498, AW205281, |
| | | | | | AW204171, AW450761, AI571894, |
| | | | | | AF114491, AC004262, AC005327, |
| | | | | | AC004999, AF053356, AC004841, AL021707, |
| | | | | | AC003010, AC004834, AC007151, M22403, |
| | | | | | AC007663, and AL034400. |
| HWLXT48 | 252 | 957630 | 1-440 | 15-454 | AA932449, AA306873, AA305881, |
| | | | | | AW245862, AA088641, N44651, N31513, |
| | | | | | R25850, R88663, AW248398, AI073401, |
| | | | | | AA137171, AW449148, AI824292, |
| | | | | | AL136295, and AIF044127. |
| HBCPT10 | 253 | 957631 | 1-1278 | 15-1292 | AI131178, AI073401, AI087304, AW001150, |
| | | | | | AI870504, AA632131, AA527353, AI268314, |
| | | | | | AI199367, AI279189, AW419191, AA293161, |
| | | | | | AA639837, AI859436, AA777588, AI936230, |
| | | | | | AW071823, AA809698, AA528107, W72175, |
| | | | | | AA719229, AA809330, AI333884, AI138637, |
| | | | | | AI202785, N33080, AI299098, AA527330, |
| | | | | | AI826773, AI026030, AI291245, AA782731, |
| | | | | | AA932449, W51877, AA429946, AA931756, |
| | | | | | W76461, AA135492, AA714047, AA977092, |
| | | | | | AA293652, AW245862, AA890559, |
| | | | | | AA306873, AA564285, AI041789, R88664, |
| | | | | | AI419007, AA088221, AI537756, AA255746, |
| | | | | | AI038212, AA262033, AI147591, AA991254, |
| | | | | | AI582859, AA988303, H41229, AW068962, |
| | | | | | N44651, H43006, AI312065, AA634846, |
| | | | | | T15928, H44946, AA305881, R89745, |
| | | | | | AA738454, H45675, AI086798, AA740304, |
| | | | | | AI092660, N31513, AI183882, T23541, |
| | | | | | H38430, AA158212, AA010261, AA088641, |
| | | | | | AI608659, AI673592, AI824292, AW245604, |
| | | | | | AA758471, R30908, AI183678, AA293757, |
| | | | | | AI023829, AI202407, AI718345, AA860798, |
| | | | | | AA953640, AI635433, R96843, AA505675, |
| | | | | | R25850, H66091, H45715, AI382577, H44992, |
| | | | | | AA988157, AA010478, AA307570, |
| | | | | | AA774916, AW248398, AA374350, R88663, |
| | | | | | AA137171, AA458763, R30862, AW206472, |
| | | | | | AI823690, AA092403, AW449148, |
| | | | | | AW274454, AI557426, AI541056, AF044127, |
| | | | | | and AL136295. |
| HETKR83 | 254 | 963274 | 1-1141 | 15-1155 | AW195777, AW269932, AI829559, |
| | | | | | AI571060, AI083191, AA905071, AW118125, |
| | | | | | AI049799, AI376671, N90902, W27632, |
| | | | | | AI273588, AI890622, AI393483, AA040604, |
| | | | | | W38638, W37154, W22119, AA904910, |
| | | | | | N92239, AI194027, W27681, W27896, |
| | | | | | AW367713, C14616, C02576, C14877, |
| | | | | | R55809, AA897696, AA364393, AA298658, |
| | | | | | AA017680, W23093, W27851, H83295, |
| | | | | | W22553, D81988, R55894, AW086128, |
| | | | | | W27371, W27944, D60284, W23268, |
| | | | | | AA040705, AF122922, AF122923, and |
| | | | | | AC044883. |
| HEBGK01 | 255 | 1229764 | 1-805 | 15-819 | AI492142, AI589904, AI937547, AI949088, |
| | | | | | AI937401, AI937365, AA310331, AI738487, |
| | | | | | AI762089, AI423302, AI392899, AW005988, |
| | | | | | AI273612, AA158790, AI423099, AI498277, |
| | | | | | AI373573, AI674232, AI479717, AI479444, |
| | | | | | AI805937, AI015112, AI199565, AW172357, |
| | | | | | AW001280, AI695937, AI967979, AI628404, |
| | | | | | AI015123, AI758134, M91490, AW004003, |
| | | | | | AI611805, AA335730, R55863, AI869102, |
| | | | | | AI928600, AI825116, AA045102, AI865576, |
| | | | | | AI363811, AA158791, AI263152, AA843385, |
| | | | | | AA232568, C21054, and Z97653. |
| HAPBS07 | 256 | 967325 | 1-742 | 15-756 | AA284453, AA481096, AA465418, W17165, |
| | | | | | AW405741, AW404541, AA304808, |
| | | | | | AR028677, AF067174, and AC007556. |
| HWLPR94 | 257 | 967326 | 1-484 | 15-498 | AA304808, AI041126, AR028677, and |
| | | | | | AF067174. |
| HE6GK65 | 258 | 1128005 | 1-1515 | 15-1529 | AA176796, AL045370, AL045371, and |
| | | | | | AA339750. |
| HAPO167 | 259 | 971184 | 1-2190 | 15-2204 | H70763, H70762, AW376414, AW403498, |
| | | | | | AI571894, AW450761, AF114491, AC004262, |
| | | | | | and AC005327. |
| HE8NI05 | 260 | 1217155 | 1-2999 | 15-3013 | AI468004, AI924049, AA243790, AI811485, |
| | | | | | AI828757, AA916944, AA620465, AL134851, |
| | | | | | AW023721, N70192, AA361686, AA894452, |
| | | | | | AA136774, AI187979, N98388, AW295746, |
| | | | | | D57483, C14429, D80253, D51423, D81030, |
| | | | | | D59859, D80166, D59619, D80210, D80240, |
| | | | | | D51799, D80227, D58283, D80212, D59889, |
| | | | | | D80219, D80188, D80195, D80391, D59610, |
| | | | | | D80043, D80269, D80366, D80196, D59927, |
| | | | | | D80038, D80193, C14331, D80241, D80022, |
| | | | | | D80024, D59502, D59275, D50995, D50979, |
| | | | | | D80045, D59787, D80378, C75259, T03269, |
| | | | | | C14014, D80164, C15076, D80134, C14389, |
| | | | | | D51060, D59467, AA305409, AW178893, |
| | | | | | D80268, D81026, F13647, D58253, D80949, |
| | | | | | D51079, D81111, D80168, D51022, C14227, |
| | | | | | AW177440, AW179328, AW178775, |
| | | | | | AW378532, AI905856, AA305578, D80251, |
| | | | | | D80522, AW352158, Z21582, D80248, |
| | | | | | D51097, D59695, AW377671, D80133, |
| | | | | | AW178762, AA514188, D52291, AA514186, |
| | | | | | AW177501, AA285331, AW177511, C14298, |
| | | | | | D80064, AW360811, AW352117, AW176467, |
| | | | | | AW375405, AW360834, AI557751, |
| | | | | | AW366296, AW352170, AW360844, |
| | | | | | AW360817, AW375406, AW378534, |
| | | | | | AW179332, AW377672, AW179023, |
| | | | | | AW178905, D80439, D80132, AW177731, |
| | | | | | D80302, AW352171, AW177733, AW179220, |
| | | | | | AW377676, AW178906, D51103, AW178907, |
| | | | | | AW179019, AW179024, D80247, AW177505, |
| | | | | | AW179020, AW178909, AW177456, |
| | | | | | AW179329, AW178980, AW378528, D80014, |
| | | | | | AW178908, AW178754, AW179018, T25746, |
| | | | | | D80157, T11417, AW179004, AW178914, |
| | | | | | AW378525, AI535686, AW178774, |
| | | | | | AW178911, AW352163, AA809122, T02974, |
| | | | | | AW178983, C06015, D58246, T48593, |
| | | | | | AW177723, AI557774, D45260, D51213, |
| | | | | | D80258, D59503, H67854, C14975, D59627, |
| | | | | | AI535850, AW367950, C03092, H67866, |
| | | | | | AW367967, AW378533, AW178986, |
| | | | | | AA033512, AW352174, C14973, D59317, |
| | | | | | AI525235, AI525920, AA514184, AI535961, |
| | | | | | D45273, D59551, AI525227, AF166350, |
| | | | | | A62298, A84916, A62300, AR015138, |
| | | | | | Y17188, AJ132110, X67155, D89785, |
| | | | | | A78862, A67220, A25909, D26022, D34614, |
| | | | | | D88547, X82626, AF058696, AR025207, |
| | | | | | AR008278, AB028859, A82595, AB012117, |
| | | | | | X68127, Y12724, A85396, AR066482, |
| | | | | | A44171, A85477, 119525, A86792, X93549, |
| | | | | | Y17187, U87250, A94995, AR060385, |
| | | | | | AB002449, AiR008443, AF135125, I50126, |
| | | | | | I50132, I50128, I50133, AR066488, |
| | | | | | AR016514, AR060138, A45456, A26615, |
| | | | | | AR052274, A30438, Y09669, A43192, |
| | | | | | A43190, AR038669, D88507, AR064240, |
| | | | | | AR066487, AR054175, I14842, AB033111, |
| | | | | | I18367, D50010, AR008277, AR008281, |
| | | | | | A63261, AR008408, AR066490, AR016691, |
| | | | | | AR016690, U46128, AR062872, A70867, |
| | | | | | D13509, AR060133, U87247, A64136, |
| | | | | | A68321, I79511, Z32749, U79457, AB023656, |
| | | | | | X93535, and AR008382. |
| HHENW06 | 261 | 971310 | 1-1257 | 15-1271 | AW387854, R60430, H15208, AA454508, |
| | | | | | AA194058, H06926, T66357, AA159059, |
| | | | | | F06846, W40388, AA453713, AA160862, |
| | | | | | F08019, AA704013, AL117551, L40459, and |
| | | | | | AR012385. |
| HNTAV78 | 262 | 971315 | 1-528 | 15-542 | |
| HMVCP64 | 263 | 1027019 | 1-1406 | 15-1420 | AI215040, AW013830, AA425778, N30265, |
| | | | | | N41988, AA629285, AI867286, AI252688, |
| | | | | | AI254897, AI252700, AI252025, AI254872, |
| | | | | | AI251390, AA426241, Z97832, T69818, |
| | | | | | T79188, H56903, N25210, AA036873, |
| | | | | | AA069947, AA070043, AA070816, |
| | | | | | AA987991, AA642407, AA722424, |
| | | | | | AA926653, AI032936, AI217681, AI223329, |
| | | | | | AI335941, AI911835, AI871571, and |
| | | | | | AW295579. |
| HE8UT58 | 264 | 973153 | 1-1090 | 15-1104 | AL079991, AW409774, AA404732, |
| | | | | | AA782257, AI808909, AA099036, AA677654, |
| | | | | | AA405418, AW341107, AW409667, |
| | | | | | AA659407, AA503263, AI433410, AI885266, |
| | | | | | AI341147, AA905366, AI692534, AI027623, |
| | | | | | AA468344, AA923181, AA778251, AI681129, |
| | | | | | AA533117, AI986154, AA099037, AI955317, |
| | | | | | AI276678, H29006, AA404602, AI347168, |
| | | | | | AA371047, AI420387, AW135263, |
| | | | | | AA868124, T12623, H09118, AA430277, |
| | | | | | AA365338, T08839, AA813337, H29109, |
| | | | | | H11272, AW137535, AB014534, AF116574, |
| | | | | | NF116573, and AC032004. |
| HDPBI30 | 265 | 974711 | 1-2911 | 15-2925 | AA714520, N78665, W15172, AL134531, |
| | | | | | AA074818, AI251157, AI311635, AA079403, |
| | | | | | AW130754, AI935943, AF083955, AC005015, |
| | | | | | AL034423, AP000030, AC002992, AC004216, |
| | | | | | AC003013, U91321, AC003684, AC002528, |
| | | | | | AL117258, AL021155, AP000045, AF053356, |
| | | | | | AL033521, AC004598, U91326, AL035072, |
| | | | | | AD000091, U82668, AC012384, L44140, |
| | | | | | AF006752, AL034350, AC006039, AC005756, |
| | | | | | AC005072, AL034429, AC002352, |
| | | | | | AC005682, AC003663, AC005049, |
| | | | | | AC007298, AC005620, AC004887, |
| | | | | | AL117694, AC005911, AC007688, |
| | | | | | AC006014, AC004797, AL031186, |
| | | | | | AL031283, AC004963, L47234, Z84466, |
| | | | | | AC004125, AC005529, AL031293, |
| | | | | | AC006276, AL034400, AC004099, |
| | | | | | AC005089, AL049871, AC004893, |
| | | | | | AL080243, AC007021, AL049712, |
| | | | | | AC007993, AC006581, AC005837, |
| | | | | | AF139813, M13792, AC005086, AL096791, |
| | | | | | AJ251973, AC002301, AC006139, AC005488, |
| | | | | | L78810, AC006115, AC004966, AC006538, |
| | | | | | Z93244, AC004834, AL049570, AC004084, |
| | | | | | AP000113, AP000251, and AC005696. |
| HNECM88 | 266 | 1128027 | 1-1090 | 15-1104 | AW403840, AI735206, AI471822, AA533054, |
| | | | | | AA297496, AA503144, AA482928, |
| | | | | | AW103753, F25301, AA342238, AA456149, |
| | | | | | AI271762, F00533, AL040374, AI283938, |
| | | | | | F17537, AA664126, AI287921, AA659832, |
| | | | | | AA666411, AA652677, AW083678, |
| | | | | | AA648618, AA526193, AW238016, |
| | | | | | AI189682, F26072, AW407220, N64587, |
| | | | | | AI683385, AI079901, T71936, AA595221, |
| | | | | | N67526, AI148404, AI569086, AI683846, |
| | | | | | AA811578, AI206841, AL041854, AA505606, |
| | | | | | AW068316, AA715850, AI978712, AI343986, |
| | | | | | AA804808, AA683069, N51140, AA297443, |
| | | | | | N47882, AI865807, U71383, AF170484, |
| | | | | | I34294, AC002472, AC005377, AC005881, |
| | | | | | AC006509, AL109827, AC007030, U02057, |
| | | | | | U47924, AC004099, AC004531, AC004752, |
| | | | | | AC007690, AC005730, AC007731, |
| | | | | | AC005071, AC007664, AC004400, |
| | | | | | AC004033, AC005229, Z97054, AL121655, |
| | | | | | AC005500, AL078584, AP000555, AC004991, |
| | | | | | AC005846, AC007193, AC006960, M87922, |
| | | | | | AL024498, AC006965, AC006141, |
| | | | | | AC002316, AL008718, AL031659, |
| | | | | | AC006064, AL035587, AC005261, |
| | | | | | AL121658, AC006576, AL009179, |
| | | | | | AC007792, AF111168, AL009183, U32323, |
| | | | | | AC005209, AC002990, AC004522, |
| | | | | | AC002550, AC005844, AC004887, |
| | | | | | AP000432, AC005914, Z85986, AF030876, |
| | | | | | AC009509, AC004148, Z83826, AC005225, |
| | | | | | U02068, A3246003, AL049832, AC006084, |
| | | | | | U73643, AL049776, AC004212, AL021453, |
| | | | | | AL021391, AC005088, AL022326, |
| | | | | | AC003041, AC002054, AL096701, |
| | | | | | AC002395, AC005138, AP000213, |
| | | | | | AC005821, AL121825, AC005231, |
| | | | | | AC004775, AC006312, U91323, AC006930, |
| | | | | | AP000135, AC007934, AP000031, U91321, |
| | | | | | Z93020, AP000512, U94788, Z84480, |
| | | | | | AC003982, AL022238, U29895, AL109758, |
| | | | | | AC003007, AC005943, AL020997, Z84466, |
| | | | | | AC006241, AC004814, AC006088, |
| | | | | | AC007637, Z69920, AC005575, AC009247, |
| | | | | | AL050307, AL034582, AL136295, AL034423, |
| | | | | | AF196779, AC003101, U78027, AC007130, |
| | | | | | Z82178, AC005412, AL035659, AL109628, |
| | | | | | AC007955, AP000346, AL035415, AL049576, |
| | | | | | AC002418, AC005924, AF031078, |
| | | | | | AC004941, AL031985, AL031255, AL031781, |
| | | | | | AC004755, AC007488, AL122021, |
| | | | | | AL049569, AC005014, AC004024, |
| | | | | | AC007421, AC003663, L78833, AC004883, |
| | | | | | AC004491, AC004983, AC006040, |
| | | | | | AC020663, AC004953, D88270, AL032821, |
| | | | | | AC004112, AC005632, AL031733, |
| | | | | | AC007066, AC004254, AC006456, |
| | | | | | AL035422, AC004386, AF024533, AC007388, |
| | | | | | AC004820, AC004019, AC006571, |
| | | | | | AL078477, AC006006, AP000330, AL031257, |
| | | | | | AP000689, Z98200, AC007766, AL034379, |
| | | | | | AC005696, AC005620, AC005803, |
| | | | | | AL031311, AP000247, AL133163, AC002375, |
| | | | | | AC000120, AC004647, AL035668, AF114156, |
| | | | | | AC005049, AC007151, AL035681, |
| | | | | | AL049540, AL034420, AC004476, AL121652, |
| | | | | | AC006254, AC001231, NP000114, AP000046, |
| | | | | | AC005899, AP000691, AC005538, Z99716, |
| | | | | | AC002288, AC005933, AL022323, |
| | | | | | AC005317, AC006130, AC004217, |
| | | | | | AC005775, AC004771, Y14768, AC008018, |
| | | | | | AC008545, AC003950, AC005513, |
| | | | | | AL133275, AC004834, AC005005, |
| | | | | | AL031597, AL109754, AP000130, AP000208, |
| | | | | | AL096791, U29953, AC005756, AL078581, |
| | | | | | and AC004974. |
| HFXJI27 | 267 | 971046 | 1-427 | 15-441 | AI335925, AI890750, AA187638, N39062, |
| | | | | | AI268071, D79411, N75622, N22381, |
| | | | | | H13284, R43578, F10497, R26373, AI625385, |
| | | | | | AI220697, R21997, AA932204, AI493179, |
| | | | | | AI373111, AA909963, AI476063, AA909961, |
| | | | | | AI888010, AI619918, AA976881, AW339040, |
| | | | | | AI432041, AA015789, AI049514, AI355877, |
| | | | | | M888471, N59174, AI679618, AI373318, |
| | | | | | AA670204, AI358468, AI336216, AI266210, |
| | | | | | AA947133, R33792, AW081307, AA610540, |
| | | | | | AA928678, AA922947, AA922946, AI817788, |
| | | | | | AI245931, AA948492, AA044223, T63607, |
| | | | | | AI433872, AW269052, AI587384, AA827770, |
| | | | | | AW182646, AI127888, H89128, AI268557, |
| | | | | | D62713, T63317, R35227, AA018661, |
| | | | | | AW023089, N67948, T62565, H01498, |
| | | | | | R21841, AW151373, D29213, AW022288, |
| | | | | | AA678512, and AB023187. |

[0089] TABLE 4

| Code | Description | Tissue | Organ | Cell Line | Disease | Vector |
|---|---|---|---|---|---|---|
| AR022 | a_Heart | a_Heart | | | | |
| AR023 | a_Liver | a_Liver | | | | |
| AR024 | a_mammary gland | a_mammary gland | | | | |
| AR025 | a_Prostate | a_Prostate | | | | |
| AR026 | a_small intestine | a_small intestine | | | | |
| AR027 | a_Stomach | a_Stomach | | | | |
| AR028 | Blood B cells | Blood B cells | | | | |
| AR029 | Blood B cells activated | Blood B cells | | | | |
| | | activated | | | | |
| AR030 | Blood B cells resting | Blood B cells | | | | |
| | | resting | | | | |
| AR031 | Blood T cells activated | Blood T cells | | | | |
| | | activated | | | | |
| AR032 | Blood T cells resting | Blood T cells resting | | | | |
| AR033 | brain | brain | | | | |
| AR034 | breast | breast | | | | |
| AR035 | breast cancer | breast cancer | | | | |
| AR036 | Cell Line CAOV3 | Cell Line CAOV3 | | | | |
| AR037 | cell line PA-1 | cell line PA-1 | | | | |
| AR038 | cell line transformed | cell line transformed | | | | |
| AR039 | colon | colon | | | | |
| AR040 | colon (9808co65R) | colon (9808co65R) | | | | |
| AR041 | colon (9809co15) | colon (9809co15) | | | | |
| AR042 | colon cancer | colon cancer | | | | |
| AR043 | colon cancer (9808co64R) | colon cancer | | | | |
| | | (9808co64R) | | | | |
| AR044 | colon cancer 9809co14 | colon cancer | | | | |
| | | 9809co14 | | | | |
| AR045 | corn clone 5 | corn clone 5 | | | | |
| AR046 | corn clone 6 | corn clone 6 | | | | |
| AR047 | corn clone2 | corn clone2 | | | | |
| AR048 | corn clone3 | corn clone3 | | | | |
| AR049 | Corn Clone4 | Corn Clone4 | | | | |
| AR050 | Donor II B Cells 24 hrs | Donor II B Cells | | | | |
| | | 24 hrs | | | | |
| AR051 | Donor II B Cells 72 hrs | Donor II B Cells | | | | |
| | | 72 hrs | | | | |
| AR052 | Donor II B-Cells 24 hrs. | Donor II B-Cells 24 | | | | |
| | | hrs. | | | | |
| AR053 | Donor II B-Cells 72 hrs | Donor II B-Cells | | | | |
| | | 72 hrs | | | | |
| AR054 | Donor II Resting B Cells | Donor II Resting B | | | | |
| | | Cells | | | | |
| AR055 | Heart | Heart | | | | |
| AR056 | Human Lung (clonetech) | Human Lung | | | | |
| | | (clonetech) | | | | |
| AR057 | Human Mammary | Human Mammary | | | | |
| | (clontech) | (clontech) | | | | |
| AR058 | Human Thymus | Human Thymus | | | | |
| | (clonetech) | (clonetech) | | | | |
| AR059 | Jurkat (unstimulated) | Jurkat | | | | |
| | | (unstimulated) | | | | |
| AR060 | Kidney | Kidney | | | | |
| AR061 | Liver | Liver | | | | |
| AR062 | Liver (Clontech) | Liver (Clontech) | | | | |
| AR063 | Lymphocytes chronic | Lymphocytes | | | | |
| | lymphocytic leukaemia | chronic lymphocytic | | | | |
| | | leukaemia | | | | |
| AR064 | Lymphocytes diffuse large | Lymphocytes | | | | |
| | B cell lymphoma | diffuse large B cell | | | | |
| | | lymphoma | | | | |
| AR065 | Lymphocytes follicular | Lymphocytes | | | | |
| | lymphoma | follicular lymphoma | | | | |
| AR066 | normal breast | normal breast | | | | |
| AR067 | Normal Ovarian | Normal Ovarian | | | | |
| | (4004901) | (4004901) | | | | |
| AR068 | Normal Ovary 9508G045 | Normal Ovary | | | | |
| | | 9508G045 | | | | |
| AR069 | Normal Ovary 9701G208 | Normal Ovary | | | | |
| | | 9701G208 | | | | |
| AR070 | Normal Ovary 9806G005 | Normal Ovary | | | | |
| | | 9806G005 | | | | |
| AR071 | Ovarian Cancer | Ovarian Cancer | | | | |
| AR072 | Ovarian Cancer | Ovarian Cancer | | | | |
| | (9702G001) | (9702G001) | | | | |
| AR073 | Ovarian Cancer | Ovarian Cancer | | | | |
| | (9707G029) | (9707G029) | | | | |
| AR074 | Ovarian Cancer | Ovarian Cancer | | | | |
| | (9804G011) | (9804G011) | | | | |
| AR075 | Ovarian Cancer | Ovarian Cancer | | | | |
| | (9806G019) | (9806G019) | | | | |
| AR076 | Ovarian Cancer | Ovarian Cancer | | | | |
| | (9807G017) | (9807G017) | | | | |
| AR077 | Ovarian Cancer | Ovarian Cancer | | | | |
| | (9809G001) | (9809G001) | | | | |
| AR078 | ovarian cancer 15799 | ovarian cancer | | | | |
| | | 15799 | | | | |
| AR079 | Ovarian Cancer | Ovarian Cancer | | | | |
| | 17717AID | 17717AID | | | | |
| AR080 | Ovarian Cancer | Ovarian Cancer | | | | |
| | 4004664B1 | 4004664B1 | | | | |
| AR081 | Ovarian Cancer | Ovarian Cancer | | | | |
| | 4005315A1 | 4005315A1 | | | | |
| AR082 | ovarian cancer 94127303 | ovarian cancer | | | | |
| | | 94127303 | | | | |
| AR083 | Ovarian Cancer 96069304 | Ovarian Cancer | | | | |
| | | 96069304 | | | | |
| AR084 | Ovarian Cancer 97070029 | Ovarian Cancer | | | | |
| | | 97070029 | | | | |
| AR085 | Ovarian Cancer 98070045 | Ovarian Cancer | | | | |
| | | 98070045 | | | | |
| AR086 | ovarian cancer 9809G001 | ovarian cancer | | | | |
| | | 9809G001 | | | | |
| AR087 | Ovarian Cancer | Ovarian Cancer | | | | |
| | 9905C032RC | 9905C032RC | | | | |
| AR088 | Ovarian cancer 9907 C00 | Ovarian cancer 9907 | | | | |
| | 3rd | C00 3rd | | | | |
| AR089 | Prostate | Prostate | | | | |
| AR090 | Prostate (clonetech) | Prostate (clonetech) | | | | |
| AR091 | prostate cancer | prostate cancer | | | | |
| AR092 | prostate cancer #15176 | prostate cancer | | | | |
| | | #15176 | | | | |
| AR093 | prostate cancer #15509 | prostate cancer | | | | |
| | | #15509 | | | | |
| AR094 | prostate cancer #15673 | prostate cancer | | | | |
| | | #15673 | | | | |
| AR095 | Small Intestine (Clontech) | Small Intestine | | | | |
| | | (Clontech) | | | | |
| AR096 | Spleen | Spleen | | | | |
| AR097 | Thymus T cells activated | Thymus T cells | | | | |
| | | activated | | | | |
| AR098 | Thymus T cells resting | Thymus T cells | | | | |
| | | resting | | | | |
| AR099 | Tonsil | Tonsil | | | | |
| AR100 | Tonsil geminal center | Tonsil geminal | | | | |
| | centroblast | center centroblast | | | | |
| AR101 | Tonsil germinal center | B Tonsil germinal | | | | |
| | cell | center B cell | | | | |
| AR102 | Tonsil lymph node | Tonsil lymph node | | | | |
| AR103 | Tonsil memory B cell | Tonsil memory B | | | | |
| | | cell | | | | |
| AR104 | Whole Brain | Whole Brain | | | | |
| AR105 | Xenograft ES-2 | Xenograft ES-2 | | | | |
| AR106 | Xenograft SW626 | Xenograft SW626 | | | | |
| H0002 | Human Adult Heart | Human Adult Heart | Heart | | | Uni-ZAP XR |
| H0004 | Human Adult Spleen | Human Adult | Spleen | | | Uni-ZAP XR |
| | | Spleen | | | | |
| H0008 | Whole 6 Week Old | | | | | Uni-ZAP XR |
| | Embryo | | | | | |
| H0009 | Human Fetal Brain | | | | | Uni-ZAP XR |
| H0011 | Human Fetal Kidney | Human Fetal Kidney | Kidney | | | Uni-ZAP XR |
| H0012 | Human Fetal Kidney | Human Fetal Kidney | Kidney | | | Uni-ZAP XR |
| H0013 | Human 8 Week Whole | Human 8 Week Old | Embryo | | | Uni-ZAP XR |
| | Embryo | Embryo | | | | |
| H0014 | Human Gall Bladder | Human Gall Bladder | Gall Bladder | | | Uni-ZAP XR |
| H00l5 | Human Gall Bladder, | Human Gall Bladder | Gall Bladder | | | Uni-ZAP XR |
| | fraction II | | | | | |
| H0017 | Human Greater Omentum | Human Greater | peritoneum | | | Uni-ZAP XR |
| | | Omentum | | | | |
| H0020 | Human Hippocampus | Human | Brain | | | Uni-ZAP XR |
| | | Hippocampus | | | | |
| H0021 | Human Infant Adrenal | Human Infant | Adrenal | | | Uni-ZAP XR |
| | Gland | Adrenal Gland | gland | | | |
| H0023 | Human Fetal Lung | | | | | Uni-ZAP XR |
| H0024 | Human Fetal Lung III | Human Fetal Lung | Lung | | | Uni-ZAP XR |
| H0028 | Human Old Ovary | Human Old Ovary | Ovary | | | pBluescript |
| H0030 | Human Placenta | | | | | Uni-ZAP XR |
| H0031 | Human Placenta | Human Placenta | Placenta | | | Uni-ZAP XR |
| H0032 | Human Prostate | Human Prostate | Prostate | | | Uni-ZAP XR |
| H0036 | Human Adult Small | Human Adult Small | Small Int. | | | Uni-ZAP XR |
| | Intestine | Intestine | | | | |
| H0038 | Human Testes | Human Testes | Testis | | | Uni-ZAP XR |
| H0039 | Human Pancreas Tumor | Human Pancreas | Pancreas | | disease | Uni-ZAP XR |
| | | Tumor | | | | |
| H0040 | Human Testes Tumor | Human Testes | Testis | | disease | Uni-ZAP XR |
| | | Tumor | | | | |
| H0041 | Human Fetal Bone | Human Fetal Bone | Bone | | | Uni-ZAP XR |
| H0042 | Human Adult Pulmonary | Human Adult | Lung | | | Uni-ZAP XR |
| | | Pulmonary | | | | |
| H0046 | Human Endometrial | Human Endometrial | Uterus | | disease | Uni-ZAP XR |
| | Tumor | Tumor | | | | |
| H0050 | Human Fetal Heart | Human Fetal Heart | Heart | | | Uni-ZAP XR |
| H0051 | Human Hippocampus | Human | Brain | | | Uni-ZAP XR |
| | | Hippocampus | | | | |
| H0052 | Human Cerebellum | Human Cerebellum | Brain | | | Uni-ZAP XR |
| H0056 | Human Umbilical Vein, | Human Umbilical | Umbilical | | | Uni-ZAP XR |
| | Endo. remake | Vein Endothelial | vein | | | |
| | | Cells | | | | |
| H0057 | Human Fetal Spleen | | | | | Uni-ZAP XR |
| H0059 | Human Uterine Cancer | Human Uterine | Uterus | | disease | Lambda ZAP II |
| | | Cancer | | | | |
| H0063 | Human Thymus | Human Thymus | Thymus | | | Uni-ZAP XR |
| H0068 | Human Skin Tumor | Human Skin Tumor | Skin | | disease | Uni-ZAP XR |
| H0069 | Human Activated T-Cells | Activated T-Cells | Blood | Cell Line | | Uni-ZAP XR |
| H0071 | Human Infant Adrenal | Human Infant | Adrenal | | | Uni-ZAP XR |
| | Gland | Adrenal Gland | gland | | | |
| H0075 | Human Activated T-Cells | Activated T-Cells | Blood | Cell Line | | Uni-ZAP XR |
| | (II) | | | | | |
| H0081 | Human Fetal Epithelium | Human Fetal Skin | Skin | | | Uni-ZAP XR |
| | (Skin) | | | | | |
| H0083 | HUMAN JURKAT | Jurkat Cells | | | | Uni-ZAP XR |
| | MEMBRANE BOUND | | | | | |
| | POLYSOMES | | | | | |
| H0085 | Human Colon | Human Colon | | | | Lambda ZAP II |
| H0086 | Human epithelioid | Epithelioid | Sk Muscle | | disease | Uni-ZAP XR |
| | sarcoma | Sarcoma, muscle | | | | |
| H0087 | Human Thymus | Human Thymus | | | | pBluescript |
| H0090 | Human T-Cell Lymphoma | T-Cell Lymphoma | T-Cell | | disease | Uni-ZAP XR |
| H0100 | Human Whole Six Week | Human Whole Six | Embryo | | | Uni-ZAP XR |
| | Old Embryo | Week Old Embryo | | | | |
| H0102 | Human Whole 6 Week | Human Whole Six | Embryo | | | pBluescript |
| | Old Embryo (II), subt | Week Old Embryo | | | | |
| H0103 | Human Fetal Brain, | Human Fetal Brain | Brain | | | Uni-ZAP XR |
| | subtracted | | | | | |
| H0105 | Human Fetal Heart, | Human Fetal Heart | Heart | | | pBluescript |
| | subtracted | | | | | |
| H0109 | Human Macrophage, | Macrophage | Blood | Cell Line | | pBluescript |
| | subtracted | | | | | |
| H0111 | Human Placenta, | Human Placenta | Placenta | | | pBluescript |
| | subtracted | | | | | |
| H0116 | Human Thymus Tumor, | Human Thymus | Thymus | | | pBluescript |
| | subtracted | Tumor | | | | |
| H0122 | Human Adult Skeletal | Human Skeletal | Sk Muscle | | | Uni-ZAP XR |
| | Muscle | Muscle | | | | |
| H0123 | Human Fetal Dura Mater | Human Fetal Dura | Brain | | | Uni-ZAP XR |
| | | Mater | | | | |
| H0124 | Human | Human | Sk Muscle | | disease | Uni-ZAP XR |
| | Rhabdomyosarcoma | Rhabdomyosarcoma | | | | |
| H0125 | Cem cells cyclohexamide | Cyclohexamide | Blood | Cell Line | | Uni-ZAP XR |
| | treated | Treated Cem, Jurkat, | | | | |
| | | Raji, and Supt | | | | |
| H0129 | Jurkat cells, thiouridine | Jurkat Cells | | | | Uni-ZAP XR |
| | activated, fract II | | | | | |
| H0132 | LNCAP + 3OnM R1881 | LNCAP Cell Line | Prostate | Cell Line | | Uni-ZAP XR |
| H0134 | Raji Cells, cyclohexamide | Cyclohexamide | Blood | Cell Line | | Uni-ZAP XR |
| | treated | Treated Cem, Jurkat, | | | | |
| | | Raji, and Supt | | | | |
| H0135 | Human Synovial Sarcoma | Human Synovial | Synovium | | | Uni-ZAP XR |
| | | Sarcoma | | | | |
| H0136 | Supt Cells, cyclohexamide | Cyclohexamide | Blood | Cell Line | | Uni-ZAP XR |
| | treated | Treated Cem, Jurkat, | | | | |
| | | Raji, and Supt | | | | |
| H0140 | Activated T-Cells, 8 hrs. | Activated T-Cells | Blood | Cell Line | | Uni-ZAP XR |
| H0144 | Nine Week Old Early | 9 Wk Old Early | Embryo | | | Uni-ZAP XR |
| | Stage Human | Stage Human | | | | |
| H0149 | 7 Week Old Early Stage | Human Whole 7 | Embryo | | | Uni-ZAP XR |
| | Human, subtracted | Week Old Embryo | | | | |
| H0150 | Human Epididymus | Epididymis | Testis | | | Uni-ZAP XR |
| H0156 | Human Adrenal Gland | Human Adrenal | Adrenal | | disease | Uni-ZAP XR |
| | Tumor | Gland Tumor | Gland | | | |
| H0163 | Human Synovium | Human Synovium | Synovium | | | Uni-ZAP XR |
| H0169 | Human Prostate Cancer, | Human Prostate | Prostate | | disease | Uni-ZAP XR |
| | Stage C fraction | Cancer, stage C | | | | |
| H0170 | 12 Week Old Early Stage | Twelve Week Old | Embryo | | | Uni-ZAP XR |
| | Human | Early Stage Human | | | | |
| H0171 | 12 Week Old Early Stage | Twelve Week Old | Embryo | | | Uni-ZAP XR |
| | Human, II | Early Stage Human | | | | |
| H0172 | Human Fetal Brain, | Human Fetal Brain | Brain | | | Lambda ZAP II |
| | random primed | | | | | |
| H0176 | CAMA1Ee Cell Line | CAMAlEe Cell | Breast | Cell Line | | Uni-ZAP XR |
| | | Line | | | | |
| H0178 | Human Fetal Brain | Human Fetal Brain | Brain | | | Uni-ZAP XR |
| H0179 | Human Neutrophil | Human Neutrophil | Blood | Cell Line | | Uni-ZAP XR |
| H0181 | Human Pnmary Breast | Human Primary | Breast | | disease | Uni-ZAP XR |
| | Cancer | Breast Cancer | | | | |
| H0182 | Human Primary Breast | Human Primary | Breast | | disease | Uni-ZAP XR |
| | Cancer | Breast Cancer | | | | |
| H0184 | Human Colon Cancer, | Human Colon | Liver | | disease | Lambda ZAP II |
| | metasticized to live | Cancer, metasticized | | | | |
| | | to liver | | | | |
| H0187 | Resting T-Cell | T-Cells | Blood | Cell Line | | Lambda ZAP II |
| H0188 | Human Normal Breast | Human Normal | Breast | | | Uni-ZAP XR |
| | | Breast | | | | |
| H0189 | Human Resting | Human | Blood | Cell Line | | Uni-ZAP XR |
| | Macrophage | Macrophage/Monocytes | | | | |
| H0194 | Human Cerebellum, | Human Cerebellum | Brain | | | pBluescript |
| | subtracted | | | | | |
| H0196 | Human Cardiomyopathy, | Human | Heart | | | Uni-ZAP XR |
| | subtracted | Cardiomyopathy | | | | |
| H0197 | Human Fetal Liver, | Human Fetal Liver | Liver | | | Uni-ZAP XR |
| | subtracted | | | | | |
| H0199 | Human Fetal Liver, | Human Fetal Liver | Liver | | | Uni-ZAP XR |
| | subtracted, neg clone | | | | | |
| H0204 | Human Colon Cancer, | Human Colon | Colon | | | pBluescript |
| | subtracted | Cancer | | | | |
| H0208 | Early Stage Human Lung, | Human Fetal Lung | Lung | | | pBluescript |
| | subtracted | | | | | |
| H0212 | Human Prostate, | Human Prostate | Prostate | | | pBluescript |
| | subtracted | | | | | |
| H0213 | Human Pituitary, | Human Pituitary | | | | Uni-ZAP XR |
| | subtracted | | | | | |
| H0214 | Raji cells, cyclohexamide | Cyclohexamide | Blood | Cell Line | | pBluescript |
| | treated, subtracted | Treated CeM, Jurkat, | | | | |
| | | Raji, and Supt | | | | |
| H0215 | Raji cells, cyclohexamide | Cyclohexamide | Blood | Cell Line | | pBluescript |
| | treated, differentially | Treated Cem, Jurkat, | | | | |
| | expressed | Raji, and Supt | | | | |
| H0216 | Supt cells, cyclohexamide | Cyclohexamide | Blood | Cell Line | | pBluescript |
| | treated, subtracted | Treated Cem, Jurkat, | | | | |
| | | Raji, and Supt | | | | |
| H0222 | Activated T-Cells, 8 hrs, | Activated T-Cells | Blood | Cell Line | | Uni-ZAP XR |
| | subtracted | | | | | |
| H0224 | Activated T-Cells, 12 hrs, | Activated T-Cells | Blood | Cell Line | | Uni-ZAP XR |
| | subtracted | | | | | |
| H0231 | Human Colon, subtraction | Human Colon | | | | pBluescript |
| H0239 | Human Kidney Tumor | Human Kidney | Kidney | | disease | Uni-ZAP XR |
| | | Tumor | | | | |
| H0242 | Human Fetal Heart, | Human Fetal Heart | Heart | | | pBluescript |
| | Differential (Fetal | | | | | |
| | Specific) | | | | | |
| H0244 | Human 8 Week Whole | Human 8 Week Old | Embryo | | | Uni-ZAP XR |
| | Embryo, subtracted | Embryo | | | | |
| H0250 | Human Activated | Human Monocytes | | | | Uni-ZAP XR |
| | Monocytes | | | | | |
| H0251 | Human Chondrosarcoma | Human | Cartilage | | disease | Uni-ZAP XR |
| | | Chondrosarcoma | | | | |
| H0252 | Human Osteosarcoma | Human | Bone | | disease | Uni-ZAP XR |
| | | Osteosarcoma | | | | |
| H0253 | Human adult testis, large | Human Adult Testis | Testis | | | Uni-ZAP XR |
| | inserts | | | | | |
| H0254 | Breast Lymph node cDNA | Breast Lymph Node | Lymph Node | | | Uni-ZAP XR |
| | library | | | | | |
| H0255 | breast lymph node CDNA | Breast Lymph Node | Lymph Node | | | Lambda ZAP II |
| | library | | | | | |
| H0261 | H. cerebellum, Enzyme | Human Cerebellum | Brain | | | Uni-ZAP XR |
| | subtracted | | | | | |
| H0263 | human colon cancer | Human Colon | Colon | | disease | Lambda ZAP II |
| | | Cancer | | | | |
| H0264 | human tonsils | Human Tonsil | Tonsil | | | Uni-ZAP XR |
| H0265 | Activated T-Cell | T-Cells | Blood | Cell Line | | Uni-ZAP XR |
| | (l2 hs),Thiouridine | | | | | |
| | labelledEco | | | | | |
| H0266 | Human Microvascular | HMEC | Vein | Cell Line | | Lambda ZAP II |
| | Endothelial Cells, fract. A | | | | | |
| H0267 | Human Microvascular | HMEC | Vein | Cell Line | | Lambda ZAP II |
| | Endothelial Cells, fract. B | | | | | |
| H0268 | Human Umbilical Vein | HUVE Cells | Umbilical | Cell Line | | Lambda ZAP II |
| | Endothelial Cells, fract. A | | vein | | | |
| H0270 | HPAS (human pancreas, | Human Pancreas | Pancreas | | | Uni-ZAP XR |
| | subtracted) | | | | | |
| H0271 | Human Neutrophil, | Human Neutrophil - | Blood | Cell Line | | Uni-ZAP XR |
| | Activated | Activated | | | | |
| H0272 | HUMAN TONSILS, | Human Tonsil | Tonsil | | | Uni-ZAP XR |
| | FRACTION 2 | | | | | |
| H0275 | Human Infant Adrenal | Human Infant | Adrenal | | | pBluescript |
| | Gland, Subtracted | Adrenal Gland | gland | | | |
| H0280 | K562 + PMA (36 hrs) | K562 Cell line | cell line | Cell Line | | ZAP Express |
| H0284 | Human OB MG63 control | Human | Bone | Cell Line | | Uni-ZAP XR |
| | fraction I | Osteoblastoma | | | | |
| | | MG63 cell line | | | | |
| H0286 | Human OB MG63 treated | Human | Bone | Cell Line | | Uni-ZAP XR |
| | (10 nM E2) fraction I | Osteoblastoma | | | | |
| | | MG63 cell line | | | | |
| H0288 | Human OB HOS control | Human | Bone | Cell Line | | Uni-ZAP XR |
| | fraction I | Osteoblastoma HOS | | | | |
| | | cell line | | | | |
| H0290 | Human OB HOS treated | Human | Bone | Cell Line | | Uni-ZAP XR |
| | (1 nM E2) fraction I | Osteoblastoma HOS | | | | |
| | | cell line | | | | |
| H0292 | Human OB HOS treated | Human | Bone | Cell Line | | Uni-ZAP XR |
| | (10 nM E2) fraction I | Osteoblastoma HOS | | | | |
| | | cell line | | | | |
| H0294 | Amniotic Cells - TNF | Amniotic Cells - | Placenta | Cell Line | | Uni-ZAP XR |
| | induced | TNF induced | | | | |
| H0295 | Amniotic Cells - Primary | Amniotic Cells - | Placenta | Cell Line | | Uni-ZAP XR |
| | Culture | Primary Culture | | | | |
| H0305 | CD34 positive cells (Cord | CD34 Positive Cells | Cord Blood | | | ZAP Express |
| | Blood) | | | | | |
| H0306 | CD34 depleted Buffy Coat | CD34 Depleted | Cord Blood | | | ZAP Express |
| | (Cord Blood) | Buffy Coat (Cord | | | | |
| | | Blood) | | | | |
| H0309 | Human Chronic Synovitis | Synovium, Chronic | Synovium | | disease | Uni-ZAP XR |
| | | Synovitis/ | | | | |
| | | Osteoarthritis | | | | |
| H0316 | HUMAN STOMACH | Human Stomach | Stomach | | | Uni-ZAP XR |
| H0318 | HUMAN B CELL | Human B Cell | Lymph Node | | disease | Uni-ZAP XR |
| | LYMPH0MA | Lymphoma | | | | |
| H0327 | human corpus colosum | Human Corpus | Brain | | | Uni-ZAP XR |
| | | Callosum | | | | |
| H0328 | human ovarian cancer | Ovarian Cancer | Ovary | | disease | Uni-ZAP XR |
| H0329 | Dermatofibrosarcoma | Dermatofibrosarcoma | Skin | | disease | Uni-ZAP XR |
| | Protuberance | a Protuberans | | | | |
| H0331 | Hepatocellular Tumor | Hepatocellular | Liver | | disease | Lambda ZAP II |
| | | Tumor | | | | |
| H0333 | Hemangiopericytoma | Hemangiopericytoma | Blood vessel | | disease | Lambda ZAP II |
| H0339 | Duodenum | Duodenum | | | | Uni-ZAP XR |
| H0341 | Bone Marrow Cell Line | Bone Marrow Cell | Bone Marrow | Cell Line | | Uni-ZAP XR |
| | (RS4;11) | Line RS4;11 | | | | |
| H0342 | Lingual Gyrus | Lingual Gyrus | Brain | | | Uni-Zap XR |
| H0343 | stomach cancer (human) | Stomach Cancer - | | | disease | Uni-ZAP XR |
| | | 5383A (human) | | | | |
| H0344 | Adipose tissue (human) | Adipose - 6825A | | | | Uni-ZAP XR |
| | | (human) | | | | |
| H0351 | Glioblastoma | Glioblastoma | Brain | | disease | Uni-ZAP XR |
| H0352 | wilm”s tumor | Wilm”s Tumor | | | disease | Uni-ZAP XR |
| H0355 | Human Liver | Human Liver, | | | | pCMVSport1 |
| | | normal Adult | | | | |
| H0357 | H. Normalized Fetal | Human Fetal Liver | Liver | | | Uni-ZAP XR |
| | Liver, II | | | | | |
| H0361 | Human rejected kidney | Human Rejected | | | disease | pBluescript |
| | | Kidney | | | | |
| H0366 | L428 cell line | L428 | | | | ZAP Express |
| H0369 | H. Atrophic Endometrium | Atrophic | | | | Uni-ZAP XR |
| | | Endometrium and | | | | |
| | | myometrium | | | | |
| H0370 | H. Lymph node breast | Lymph node with | | | disease | Uni-ZAP XR |
| | Cancer | Met. Breast Cancer | | | | |
| H0373 | Human Heart | Human Adult Heart | Heart | | | pCMVSport1 |
| H0375 | Human Lung | Human Lung | | | | pCMVSport1 |
| H0376 | Human Spleen | Human Adult | Spleen | | | pCMVSport1 |
| | | Spleen | | | | |
| H0379 | Human Tongue, frac 1 | Human Tongue | | | | pSport1 |
| H0381 | Bone Cancer | Bone Cancer | | | disease | Uni-ZAP XR |
| H0386 | Leukocyte and Lung;4 | Human Leukocytes | Blood | Cell Line | | pCMVSport1 |
| | screens | | | | | |
| H0390 | Human Amygdala | Human Amygdala | | | disease | pBluescript |
| | Depression, re-excision | Depression | | | | |
| H0391 | H. Meniingima, M6 | Human Meningima | brain | | | pSport1 |
| H0392 | H. Meningima, M1 | Human Meningima | brain | | | pSport1 |
| H0393 | Fetal Liver, subtraction II | Human Fetal Liver | Liver | | | pBluescript |
| H0395 | A1-CELL LINE | Redd-Sternberg cell | | | | ZAP Express |
| H0396 | L1 Cell line | Redd-Sternberg cell | | | | ZAP Express |
| H0402 | CD34 depleted Buffy Coat | CD34 Depleted | Cord Blood | | | ZAP Express |
| | (Cord Blood), re-excision | Buffy Coat (Cord | | | | |
| | | Blood) | | | | |
| H0404 | H. Umbilical Vein | HUVE Cells | Umbilical | Cell Line | | Uni-ZAP XR |
| | endothelial cells, | | vein | | | |
| | uninduced | | | | | |
| H0408 | Human kidney Cortex, | Human Kidney | | | | pBluescript |
| | subtracted | Cortex | | | | |
| H0409 | H. Striatum Depression, | Human Brain, | Brain | | | pBluescript |
| | subtracted | Striatum Depression | | | | |
| H0411 | H Female Bladder, Adult | Human Female | Bladder | | | pSport1 |
| | | Adult Bladder | | | | |
| H0412 | Human umbilical vein | HUVE Cells | Umbilical | Cell Line | | pSport1 |
| | endothelial cells, IL-4 | | vein | | | |
| | induced | | | | | |
| H0413 | Human Umbilical Vein | HUVE Cells | Umbilical | Cell Line | | pSport1 |
| | Endothelial Cells, | | vein | | | |
| | uninduced | | | | | |
| H0414 | Ovarian Tumor I, 0V5232 | Ovarian Tumor, | Ovary | | disease | pSport1 |
| | | 0V5232 | | | | |
| H0415 | H. Ovarian Tumor, II, | Ovarian Tumor, | Ovary | | disease | pCMVSport 2.0 |
| | 0V5232 | 0V5232 | | | | |
| H0416 | Human Neutrophils, | Human Neutrophil - | Blood | Cell Line | | pBluescript |
| | Activated, re-excision | Activated | | | | |
| H0418 | Human Pituitary, | Human Pituitary | | | | pBluescript |
| | subtracted VII | | | | | |
| H0421 | Human Bone Marrow, re- | Bone Marrow | | | | pBluescript |
| | excision | | | | | |
| H0422 | T-Cell PHA 16 hrs | T-Cells | Blood | Cell Line | | pSport1 |
| H0423 | T-Cell PHA 24 hrs | T-Cells | Blood | Cell Line | | pSport1 |
| H0424 | Human Pituitary, subt IX | Human Pituitary | | | | pBluescript |
| H0427 | Human Adipose | Human Adipose, left | | | | pSport1 |
| | | hiplipoma | | | | |
| H0428 | Human Ovary | Human Ovary | Ovary | | | pSport1 |
| | | Tumor | | | | |
| H0429 | K562 + PMA (36 hrs), re- | K562 Cell line | cell line | Cell Line | | ZAP Express |
| | excision | | | | | |
| H0431 | H. Kidney Medulla, re- | Kidney medulla | Kidney | | | pBluescript |
| | excision | | | | | |
| H0435 | Ovarian Tumor 10-3-95 | Ovarian Tumor, | Ovary | | | pCMVSport 2.0 |
| | | OV350721 | | | | |
| H0436 | Resting T-Cell Library, II | T-Cells | Blood | Cell Line | | pSport1 |
| H0437 | H Umbilical Vein | HUVE Cells | Umbilical | Cell Line | | Lambda ZAP II |
| | Endothelial Cells, frac A, | | vein | | | |
| | re-excision | | | | | |
| H0438 | H. Whole Brain #2, re- | Human Whole Brain | | | | ZAP Express |
| | excision | #2 | | | | |
| H0439 | Human Eosinophils | Eosinophils | | | | pBluescript |
| H0441 | H. Kidney Cortex, | Kidney cortex | Kidney | | | pBluescript |
| | subtracted | | | | | |
| H0444 | Spleen metastic melanoma | Spleen, Metastic | Spleen | | disease | pSport1 |
| | | malignant | | | | |
| | | melanoma | | | | |
| H0445 | Spleen, Chronic | Human Spleen, CLL | Spleen | | disease | pSport1 |
| | lymphocytic leukemia | | | | | |
| H0448 | Salivary gland, subtracted | Human Salivary | Salivary | | | Lambda ZAP II |
| | | Gland | gland | | | |
| H0453 | H. Kidney Pyramid, | Kidney pyramids | Kidney | | | pBluescript |
| | subtracted | | | | | |
| H0455 | H. Striatum Depression, | Human Brain, | Brain | | | pBluescript |
| | subt | Striatum Depression | | | | |
| H0457 | Human Eosinophils | Human Eosinophils | | | | pSport1 |
| H0458 | CD34+ cell, I, frac II | CD34 positive cells | | | | pSport1 |
| H0459 | CD34+ cells, II, | CD34 positive cells | | | | pCMVSport 2.0 |
| | FRACTION 2 | | | | | |
| H0477 | Human Tonsil, Lib 3 | Human Tonsil | Tonsil | | | pSport1 |
| H0478 | Salivary Gland, Lib 2 | Human Salivary | Salivary | | | pSport1 |
| | | Gland | gland | | | |
| H0483 | Breast Cancer cell line, | Breast Cancer Cell | | | | pSport1 |
| | MDA 36 | line, MDA 36 | | | | |
| H0484 | Breast Cancer Cell line, | Breast Cancer Cell | | | | pSport1 |
| | angiogenic | line, Angiogenic, | | | | |
| | | 36T3 | | | | |
| H0485 | Hodgkin”s Lymphoma I | Hodgkin”s | | | disease | pCMVSport 2.0 |
| | | Lymphoma I | | | | |
| H0486 | Hodgkin”s Lymphoma II | Hodgkin”s | | | disease | pCMVSport 2.0 |
| | Lymphoma II | | | | | |
| H0488 | Human Tonsils, Lib 2 | Human Tonsils | | | | pCMVSport 2.0 |
| H0489 | Crohn”s Disease | Ileum | Intestine | | disease | pSport1 |
| H0494 | Keratinocyte | Keratinocyte | | | | pCMVSport 2.0 |
| H0497 | HEL cell line | HEL cell line | | HEL | | pSport1 |
| | | | | 92.1.7 | | |
| H0506 | Ulcerative Colitis | Colon | Colon | | | pSport1 |
| H0509 | Liver, Hepatoma | Human Liver, | Liver | | disease | pCMVSport 3 0 |
| | | Hepatoma, patient 8 | | | | |
| H0510 | Human Liver, normal | Human Liver, | Liver | | | pCMVSport 3.0 |
| | | normal, Patient #8 | | | | |
| H0517 | Nasal polyps | Nasal polyps | | | | pCMVSport 2.0 |
| H0518 | pBMC stimulated w/ poly | pBMC stimulated | | | | pCMVSport 3.0 |
| | I/C | with poly I/C | | | | |
| H0519 | NTERA2, control | NTERA2, | | | | pCMVSport 3.0 |
| | | Teratocarcinoma | | | | |
| | | cell line | | | | |
| H0520 | NTERA2 + retinoic acid, | NTERA2, | | | | pSport1 |
| | 14 days | Teratocarcinoma | | | | |
| | | cell line | | | | |
| H0521 | Primary Dendritic Cells, | Primary Dendritic | | | | pCMVSport 3.0 |
| | lib 1 | cells | | | | |
| H0522 | Primary Dendritic | Primary Dendritic | | | | pCMVSport 3.0 |
| | cells, frac2 | cells | | | | |
| H0529 | Myoloid Progenitor Cell | TF-1 Cell Line; | | | | pCMVSport 3.0 |
| | Line | Myoloid progenitor | | | | |
| | | cell line | | | | |
| H0530 | Human Dermal | Human Dermal | | | | pSport1 |
| | Endothelial | Endothelial Cells; | | | | |
| | Cells,untreated | untreated | | | | |
| H0538 | Merkel Cells | Merkel cells | Lymph node | | | pSport1 |
| H0539 | Pancreas Islet Cell Tumor | Pancreas Islet Cell | Pancreas | | disease | pSport1 |
| | | Tumour | | | | |
| H0540 | Skin, burned | Skin, leg burned | Skin | | | pSport1 |
| H0542 | T Cell helper I | Helper T cell | | | | pCMVSport 3.0 |
| H0543 | T cell helper II | Helper T cell | | | | pCMVSport 3.0 |
| H0544 | Human endometrial | Human endometrial | | | | pCMVSport 3.0 |
| | stromal cells | stromal cells | | | | |
| H0545 | Human endometrial | Human endometrial | | | | pCMVSport 3.0 |
| | stromal cells-treated with | stromal cells-treated | | | | |
| | progesterone | with proge | | | | |
| H0546 | Human endometrial | Human endometrial | | | | pCMVSport 3.0 |
| | stromal cells-treated with | stromal cells-treated | | | | |
| | estradiol | with estra | | | | |
| H0547 | NTERA2 teratocarcinoma | NTERA2, | | | | pSport1 |
| | cell line + retinoic acid (14 | Teratocarcinoma | | | | |
| | days) | cell line | | | | |
| H0549 | H. Epididiymus, caput & | Human | | | | Uni-ZAP XR |
| | corpus | Epididiymus, caput | | | | |
| | | and corpus | | | | |
| H0550 | H. Epididiymus, cauda | Human | | | | Uni-ZAP XR |
| | | Epididiymus, cauda | | | | |
| H0551 | Human Thymus Stromal | Human Thymus | | | | pCMVSport 3.0 |
| | Cells | Stromal Cells | | | | |
| H0553 | Human Placenta | Human Placenta | | | | pCMVSport 3.0 |
| H0555 | Rejected Kidney, lib 4 | Human Rejected | Kidney | | disease | pCMVSport 3.0 |
| | | Kidney | | | | |
| H0556 | Activated T- | T-Cells | Blood | Cell Line | | Uni-ZAP XR |
| | cell(12 h)/Thiouridine-re- | | | | | |
| | excision | | | | | |
| H0559 | HL-60, PMA 4H, re- | HL-60 Cells, PMA | Blood | Cell Line | | Uni-ZAP XR |
| | excision | stimulated 4H | | | | |
| H0560 | KMH2 | KMH2 | | | | pCMVSport 3.0 |
| H0561 | L428 | L428 | | | | pCMVSport 3.0 |
| H0562 | Human Fetal Brain, | Human Fetal Brain | | | | pCMVSport 2.0 |
| | normalized c5-11-26 | | | | | |
| H0563 | Human Fetal Brain, | Human Fetal Brain | | | | pCMVSport 2.0 |
| | normalized 50021F | | | | | |
| H0566 | Human Fetal | Human Fetal Brain | | | | pCMVSport 2.0 |
| | Brain, normalized c50F | | | | | |
| H0567 | Human Fetal Brain, | Human Fetal Brain | | | | pCMVCSport 2.0 |
| | normalized A5002F | | | | | |
| H0570 | Human Fetal Brain, | Human Fetal Brain | | | | pCMVSport 2.0 |
| | normalized C500H | | | | | |
| H0572 | Human Fetal Brain. | Human Fetal Brain | | | | pCMVSport 2.0 |
| | normalized AC5002 | | | | | |
| H0574 | Hepatocellular Tumor;re- | Hepatocellular | Liver | | disease | Lambda ZAP II |
| | excision | Tumor | | | | |
| H0575 | Human Adult | Human Adult | Lung | | | Uni-ZAP XR |
| | Pulmonary;re-excision | Pulmonary | | | | |
| H0576 | Resting T-Cell;re- | T-Cells | Blood | Cell Line | | Lambda ZAP II |
| | excision | | | | | |
| H0578 | Human Fetal Thymus | Fetal Thymus | Thymus | | | pSport1 |
| H0580 | Dendritic cells, pooled | Pooled dendritic | | | | pCMVSport 3.0 |
| | | cells | | | | |
| H0581 | Human Bone Marrow, | Human Bone | Bone Marrow | | | pCMVSport 3.0 |
| | treated | Marrow | | | | |
| H0583 | B Cell lymphoma | B Cell Lymphoma | B Cell | | disease | pCMVSport 3 0 |
| H0584 | Activated T-cells, 24 | Activated T-Cells | Blood | Cell Line | | Uni-ZAP XR |
| | hrs, re-excision | | | | | |
| H0586 | Healing groin wound, 6.5 | healing groin | groin | | disease | pCMVSport 3.0 |
| | hours post incision | wound, 6.5 hours | | | | |
| | | post incision - 2/ | | | | |
| H0587 | Healing groin wound;7.5 | Groin-2/19/97 | groin | | disease | pCMVSport 3.0 |
| | hours post incision | | | | | |
| H0589 | CD34 positive cells (cord | CD34 Positive Cells | Cord Blood | | | ZAP Express |
| | blood), re-ex | | | | | |
| H0590 | Human adult small | Human Adult Small | Small Int. | | | Uni-ZAP XR |
| | intestine,re-excision | Intestine | | | | |
| H0591 | Human T-cell | T-Cell Lymphoma | T-Cell | | disease | Uni-ZAP XR |
| | lymphoma;re-excision | | | | | |
| H0592 | Healing groin wound - | HGS wound healing | | | disease | pCMVSport 3.0 |
| | zero hr post-incision | project;abdomen | | | | |
| | (control) | | | | | |
| H0593 | Olfactory | Olfactory epithelium | | | | pCMVSport 3.0 |
| | epithelium;nasalcavity | from roof of left | | | | |
| | | nasal cacit | | | | |
| H0594 | Human Lung Cancer;re- | Human Lung Cancer | Lung | | disease | Lambda ZAP II |
| | excision | | | | | |
| H0595 | Stomach cancer | Stomach Cancer - | | | disease | Uni-ZAP XR |
| | (human);re-excision | 5383A (human) | | | | |
| H0596 | Human Colon Cancer;re- | Human Colon | Colon | | | Lambda ZAP II |
| | excision | Cancer | | | | |
| H0597 | Human Colon; re-excision | Human Colon | | | | Lambda ZAP II |
| H0598 | Human Stomach;re- | Human Stomach | Stomach | | | Uni-ZAP XR |
| | excision | | | | | |
| H0599 | Human Adult Heart;re- | Human Adult Heart | Heart | | | Uni-ZAP XR |
| | excision | | | | | |
| H0600 | Healing Abdomen | Abdomen | | | disease | pCMVSport 3.0 |
| | wound;70&90 min post | | | | | |
| | incision | | | | | |
| H0601 | Healing Abdomen | Abdomen | | | disease | pCMVSport 3.0 |
| | Wound;15 days post | | | | | |
| | incision | | | | | |
| H0604 | Human Pituitary, re- | Human Pituitary | | | | pBluescript |
| | excision | | | | | |
| H0606 | Human Primary Breast | Human Primary | Breast | | disease | Uni-ZAP XR |
| | Cancer;re-excision | Breast Cancer | | | | |
| H0608 | H. Leukocytes, control | H.Leukocytes | | | | pCMVSport1 |
| H0609 | H. Leukocytes, | H.Leukocytes | | | | pCMVSport1 |
| | normalized cot > 500A | | | | | |
| H0610 | H. Leukocytes, | H.Leukocytes | | | | pCMVSport1 |
| | normalized cot 5A | | | | | |
| H0611 | H. Leukocytes, | H.Leukocytes | | | | pCMVSport1 |
| | normalized cot 500 B | | | | | |
| H0613 | H.Leukocytes, normalized | H.Leukocytes | | | | pCMVSport1 |
| | cot 5B | | | | | |
| H0614 | H. Leukocytes, | H.Leukocytes | | | | pCMVSport1 |
| | normalized cot 500 A | | | | | |
| H0615 | Human Ovarian Cancer | Ovarian Cancer | Ovary | | disease | Uni-ZAP XR |
| | Reexcision | | | | | |
| H0616 | Human Testes, Reexcision | Human Testes | Testis | | | Uni-ZAP XR |
| H0617 | Human Primary Breast | Human Primary | Breast | | disease | Uni-ZAP XR |
| | Cancer Reexcision | Breast Cancer | | | | |
| H0618 | Human Adult Testes, | Human Adult Testis | Testis | | | Uni-ZAP XR |
| | Large Inserts, Reexcision | | | | | |
| H0619 | Fetal Heart | Human Fetal Heart | Heart | | | Uni-ZAP XR |
| H0620 | Human Fetal Kidney; | Human Fetal Kidney | Kidney | | | Uni-ZAP XR |
| | Reexcision | | | | | |
| H0622 | Human Pancreas Tumor; | Human Pancreas | Pancreas | | disease | Uni-ZAP XR |
| | Reexcision | Tumor | | | | |
| H0623 | Human Umbilical Vein; | Human Umbilical | Umbilical | | | Uni-ZAP XR |
| | Reexcision | Vein Endothelial | vein | | | |
| | | Cells | | | | |
| H0624 | 12 Week Early Stage | Twelve Week Old | Embryo | | | Uni-ZAP XR |
| | Human II; Reexcision | Early Stage Human | | | | |
| H0625 | Ku 812F Basophils Line | Ku 812F Basophils | | | | pSport1 |
| H0626 | Saos2 Cells;Untreated | Saos2 Cell Line; | | | | pSport1 |
| | | Untreated | | | | |
| H0627 | Saos2 Cells; Vitamin D3 | Saos2 Cell Line; | | | | pSport1 |
| | Treated | Vitamin D3 Treated | | | | |
| H0628 | Human Pre-Differentiated | Human Pre- | | | | Uni-ZAP XR |
| | Adipocytes | Differentiated | | | | |
| | | Adipocytes | | | | |
| H0631 | Saos2, Dexamethosome | Saos2 Cell Line; | | | | pSport1 |
| | Treated | Dexamethosome | | | | |
| | | Treated | | | | |
| H0632 | Hepatocellular Tumor;re- | Hepatocellular | Liver | | | Lambda ZAP II |
| | excision | Tumor | | | | |
| H0633 | Lung Carcinoma A549 | TNFalpha activated | | | disease | pSport1 |
| | TNFalpha activated | A549--Lung | | | | |
| | | Carcinoma | | | | |
| H0634 | Human Testes Tumor, re- | Human Testes | Testis | | disease | Uni-ZAP XR |
| | excision | Tumor | | | | |
| H0635 | Human Activated T-Cells, | Activated T-Cells | Blood | Cell Line | | Uni-ZAP XR |
| | re-excision | | | | | |
| H0637 | Dendritic Cells From | Dentritic cells from | | | | pSport1 |
| | CD34 Cells | CD34 cells | | | | |
| H0638 | CD40 activated monocyte | CD40 activated | | | | pSport1 |
| | dendridic cells | monocyte dendridic | | | | |
| | | cells | | | | |
| H0641 | LPS activated derived | LPS activated | | | | pSport1 |
| | dendritic cells | monocyte derived | | | | |
| | | dendritic cells | | | | |
| H0643 | Hep G2 Cells, PCR library | Hep G2 Cells | | | | Other |
| H0644 | Human Placenta (re- | Human Placenta | Placenta | | | Uni-ZAP XR |
| | excision) | | | | | |
| H0645 | Fetal Heart, re-excision | Human Fetal Heart | Heart | | | Uni-ZAP XR |
| H0646 | Lung, Cancer (4005313 | Metastatic | | | | pSport1 |
| | A3): Invasive Poorly | squamous cell lung | | | | |
| | Differentiated Lung | carcinoma, poorly di | | | | |
| | Adenocarcinoma, | | | | | |
| H0647 | Lung, Cancer (4005163 | Invasive poorly | | | disease | pSport1 |
| | B7): Invasive, Poorly Diff. | differentiated lung | | | | |
| | Adenocarcinoma, | adenocarcinoma | | | | |
| | Metastatic | | | | | |
| H0648 | Ovary, Cancer: (4004562 | Papillary Cstic | | | disease | pSport1 |
| | B6) Papillary Serous | neoplasm of low | | | | |
| | Cystic Neoplasm, Low | malignant potentia | | | | |
| | Malignant Pot | | | | | |
| H0649 | Lung, Normal: (4005313 | Normal Lung | | | | pSport1 |
| | B1) | | | | | |
| H0650 | B-Cells | B-Cells | | | | pCMVSport 3 0 |
| H0651 | Ovary, Normal: | Normal Ovary | | | | pSport1 |
| | (9805C040R) | | | | | |
| H0652 | Lung, Normal: (4005313 | Normal Lung | | | | pSport1 |
| | B1) | | | | | |
| H0653 | Stromal Cells | Stromal Cells | | | | pSport1 |
| H0654 | Lung, Cancer: (4005313 | Metastatic | | | | Other |
| | A3) Invasive Poorly- | Squamous cell lung | | | | |
| | differentiated Metastatic | Carcinoma poorly | | | | |
| | lung adenoc | dif | | | | |
| H0656 | B-cells (unstimulated) | B-cells | | | | pSport1 |
| | | (unstimulated) | | | | |
| H0657 | B-cells (stimulated) | B-cells (stimulated) | | | | pSport1 |
| H0658 | Ovary, Cancer | 9809C332- Poorly | Ovary | | disease | pSport1 |
| | (9809C332): Poorly | differentiate | Fallopian | | | |
| | differentiated | | Tubes | | | |
| | adenocarcinoma | | | | | |
| H0659 | Ovary, Cancer | Grade II Papillary | Ovary | | disease | pSport1 |
| | (15395A1P): Grade II | Carcinoma, Ovary | | | | |
| | Papillary Carcinoma | | | | | |
| H0660 | Ovary, Cancer: | Poorly differentiated | | | disease | pSport1 |
| | (15799A1F) Poorly | carcinoma, ovary | | | | |
| | differentiated carcinoma | | | | | |
| H0661 | Breast, Cancer: (4004943 | Breast cancer | | | disease | pSport1 |
| | A5) | | | | | |
| H0662 | Breast, Normal: | Normal Breast - | Breast | | | pSport1 |
| | (4005522B2) | #4005522(B2) | | | | |
| H0663 | Breast, Cancer: (4005522 | Breast Cancer - | Breast | | disease | pSport1 |
| | A2) | #4005522(A2) | | | | |
| H0664 | Breast, Cancer: | Breast Cancer | Breast | | disease | pSport1 |
| | (9806C012R) | | | | | |
| H0665 | Stromal cells 3.88 | Stromal cells 3.88 | | | | pSport1 |
| H0666 | Ovary, Cancer: (4004332 | Ovarian Cancer, | | | disease | pSport1 |
| | A2) | Sample | | | | |
| | | #4004332A2 | | | | |
| H0667 | Stromal cells(HBM3.18) | Stromal cell(HBM | | | | pSport1 |
| | | 3.18) | | | | |
| H0668 | stromal cell clone 2.5 | stromal cell clone | | | | pSport1 |
| | | 2.5 | | | | |
| H0669 | Breast, Cancer: (4005385 | Breast Cancer | Breast | | | pSport1 |
| | A2) | (4005385A2) | | | | |
| H0670 | Ovary, Cancer(4004650 | Ovarian Cancer - | | | | pSport1 |
| | A3) Well-Differentiated | 4004650A3 | | | | |
| | Micropapillary Serous | | | | | |
| | Carcinoma | | | | | |
| H0672 | Ovary, Cancer: (4004576 | Ovarian | Ovary | | | pSport1 |
| | A8) | Cancer(4004576A8) | | | | |
| H0673 | Human Prostate Cancer, | Human Prostate | Prostate | | | Uni-ZAP XR |
| | Stage B2. re-excision | Cancer, stage B2 | | | | |
| H0674 | Human Prostate Cancer, | Human Prostate | Prostate | | | Uni-ZAP XR |
| | Stage C: re-excision | Cancer, stage C | | | | |
| H0675 | Colon, Cancer | Colon Cancer | | | | pCMVSport 3.0 |
| | (9808C064R) | 9808C064R | | | | |
| H0676 | Colon, Cancer | Colon Cancer | | | | pCMVSport 3.0 |
| | (9808C064R)-total RNA | 9808C064R | | | | |
| H0677 | TNFR degenerate oligo | B-Cells | | | | PCRII |
| H0682 | Serous Papillary | serous papillary | | | | pCMVSport 3.0 |
| | Adenocarcinoma | adenocarcinoma | | | | |
| | | (9606G304SPA3B) | | | | |
| H0683 | Ovarian Serous Papillary | Serous papillary | | | | pCMVSport 3.0 |
| | Adenocarcinoma | adenocarcinoma, | | | | |
| | | stage 3C (9804G01 | | | | |
| H0684 | Serous Papillary | Ovarian Cancer- | Ovaries | | | pCMVSport 3.0 |
| | Adenocarcinoma | 9810G606 | | | | |
| H0685 | Adenocarcinoma of | Adenocarcinoma of | | | | pCMVSport 3.0 |
| | Ovary, Human Cell Line, | Ovary, Human Cell | | | | |
| | # OVCAR-3 | Line, # OVCAR- | | | | |
| H0686 | Adenocarcinoma of | Adenocarcinoma of | | | | pCMVSport 3.0 |
| | Ovary, Human Cell Line | Ovary, Human Cell | | | | |
| | | Line, # SW-626 | | | | |
| H0687 | Human normal | Human normal | Ovary | | | pCMVSport 3.0 |
| | ovary(#9610G215) | ovary(#96100215) | | | | |
| H0688 | Human Ovarian | Human Ovarian | | | | pCMVSport 3.0 |
| | Cancer(#9807G017) | cancer(#9807G017), | | | | |
| | | mRNA from Mauraru | | | | |
| H0689 | Ovarian Cancer | Ovarian Cancer, | | | | pCMVSport 3.0 |
| | | #9806G019 | | | | |
| H0690 | Ovarian Cancer, # | Ovarian Cancer, | | | | pCMVSport 3.0 |
| | 9702G001 | #9702G001 | | | | |
| H0692 | BLyS Receptor from | B Cell Lymphoma | B Cell | | | pCMVSport 3.0 |
| | Expression Cloning | | | | | |
| H0694 | Prostate gland | Prostate gland, | prostate | | | pCMVSport 3.0 |
| | adenocarcinoma | adenocarcinoma, | gland | | | |
| | | mod/diff, gleason | | | | |
| H0695 | mononucleocytes from | mononucleocytes | | | | pCMVSport 3.0 |
| | patient | from patient at | | | | |
| | | Shady Grove Hospit | | | | |
| N0006 | Human Fetal Brain | Human Fetal Brain | | | | |
| N0007 | Human Hippocampus | Human | | | | |
| | | Hippocampus | | | | |
| S0001 | Brain frontal cortex | Brain frontal cortex | Brain | | | Lambda ZAP II |
| S0002 | Monocyte activated | Monocyte-activated | blood | Cell Line | | Uni-ZAP XR |
| S0003 | Human Osteoclastoma | Osteoclastoma | bone | | disease | Uni-ZAP XR |
| S0007 | Early Stage Human Brain | Human Fetal Brain | | | | Uni-ZAP XR |
| S0010 | Human Amygdala | Amygdala | | | | Uni-ZAP XR |
| S0011 | STROMAL - | Osteoclastoma | bone | | disease | Uni-ZAP XR |
| | OSTEOCLASTOMA | | | | | |
| S0013 | Prostate | Prostate | prostate | | | Uni-ZAP XR |
| S0022 | Human Osteoclastoma | Osteoclastoma | | | | Uni-ZAP XR |
| | Stromal Cells - | Stromal Cells | | | | |
| | unamplified | | | | | |
| S0026 | Stromal cell TF274 | stromal cell | Bone marrow | Cell Line | | Uni-ZAP XR |
| S0027 | Smooth muscle, serum | Smooth muscle | Pulmanary | Cell Line | | Uni-ZAP XR |
| | treated | | artery | | | |
| S0028 | Smooth muscle,control | Smooth muscle | Pulmanary | Cell Line | | Uni-ZAP XR |
| | | | artery | | | |
| S0030 | Brain pons | Brain Pons | Brain | | | Uni-ZAP XR |
| S0031 | Spinal cord | Spinal cord | spinal cord | | | Uni-ZAP XR |
| S0032 | Smooth muscle-ILb | Smooth muscle | Pulmanary | Cell Line | | Uni-ZAP XR |
| | induced | | artery | | | |
| S0036 | Human Substantia Nigra | Human Substantia | | | | Uni-ZAP XR |
| | | Nigra | | | | |
| S0037 | Smooth muscle, IL1b | Smooth muscle | Pulmanary | Cell Line | | Uni-ZAP XR |
| | induced | | artery | | | |
| S0038 | Human Whole Brain #2 - | Human Whole Brain | | | | ZAP Express |
| | Oligo dT > 1.5Kb | #2 | | | | |
| S0039 | Hypothalamus | Hypothalamus | Brain | | | Uni-ZAP XR |
| S0040 | Adipocytes | Human Adipocytes | | | | Uni-ZAP XR |
| | | from Osteoclastoma | | | | |
| S0042 | Testes | Human Testes | | | | ZAP Express |
| S0044 | Prostate BPH | prostate BPH | Prostate | | disease | Uni-ZAP XR |
| S0045 | Endothelial cells-control | Endothelial cell | endothelial | Cell Line | | Uni-ZAP XR |
| | | | cell-lung | | | |
| S0046 | Endothelial-induced | Endothelial cell | endothelial | Cell Line | | Uni-ZAP XR |
| | | | cell-lung | | | |
| S0048 | Human Hypothalamus, | Human | | | disease | Uni-ZAP XR |
| | Alzheimer”s | Hypothalamus, | | | | |
| | | Alzheimer”s | | | | |
| S0049 | Human Brain, Striatum | Human Brain, | | | | Uni-ZAP XR |
| | | Striatum | | | | |
| S0050 | Human Frontal Cortex, | Human Frontal | | | disease | Uni-ZAP XR |
| | Schizophrenia | Cortex, | | | | |
| | | Schizophrenia | | | | |
| S0051 | Human | Human | | | disease | Uni-ZAP XR |
| | Hypothalmus, Schizophrenia | Hypothalamus, | | | | |
| | | Schizophrenia | | | | |
| S0052 | neutrophils control | human neutrophils | blood | Cell Line | | Uni-ZAP XR |
| S0053 | Neutrophils IL-l and LPS | human neutrophil | blood | Cell Line | | Uni-ZAP XR |
| | induced | induced | | | | |
| S0106 | STRIATUM | | BRAIN | | disease | Uni-ZAP XR |
| | DEPRESSION | | | | | |
| S0112 | Hypothalamus | | Brain | | | Uni-ZAP XR |
| S0114 | Anergic T-cell | Anergic T-cell | | Cell Line | | Uni-ZAP XR |
| S0116 | Bone marrow | Bone marrow | Bone marrow | | | Uni-ZAP XR |
| S0126 | Osteoblasts | Osteoblasts | Knee | Cell Line | | Uni-ZAP XR |
| S0132 | Epithelial-TNFa and INF | Airway Epithelial | | | | Uni-ZAP XR |
| | induced | | | | | |
| S0134 | Apoptotic T-cell | apoptotic cells | | Cell Line | | Uni-ZAP XR |
| S0142 | Maerophage-oxLDL | macrophage- | blood | Cell Line | | Uni-ZAP XR |
| | | oxidized LDL | | | | |
| | | treated | | | | |
| S0144 | Macrophage (GM-CSF | Macrophage (GM- | | | | Uni-ZAP XR |
| | treated) | CSF treated) | | | | |
| S0146 | prostate-edited | prostate BPH | Prostate | | | Uni-ZAP XR |
| S0148 | Normal Prostate | Prostate | prostate | | | Uni-ZAP XR |
| S0150 | LNCAP prostate cell line | LNCAP Cell Line | Prostate | Cell Line | | Uni-ZAP XR |
| S0152 | PC3 Prostate cell line | PC3 prostate cell | | | | Uni-ZAP XR |
| | | line | | | | |
| S0182 | Human B Cell 8866 | Human B- Cell 8866 | | | | Uni-ZAP XR |
| S0188 | Prostate, BPH, Lib 2 | Human Prostate | | | disease | pSport1 |
| | | BPH | | | | |
| S0190 | Prostate BPH,Lib 2, | Human Prostate | | | | pSport1 |
| | subtracted | BPH | | | | |
| S0192 | Synovial Fibroblasts | Synovial Fibroblasts | | | | pSport1 |
| | (control) | | | | | |
| S0194 | Synovial hypoxia | Synovial Fibroblasts | | | | pSport1 |
| S0196 | Synovial IL-1/TNF | Synovial Fibroblasts | | | | pSport1 |
| | stimulated | | | | | |
| S0198 | 7TM-pbfd | PBLS, 7TM | | | | PCRII |
| | | receptor enriched | | | | |
| S0206 | Smooth Muscle- HASTE | Smooth muscle | Pulmanary | Cell Line | | pBluescript |
| | normalized | | artery | | | |
| S0210 | Messangial cell, frac 2 | Messangial cell | | | | pSport1 |
| S0212 | Bone Marrow Stromal | Bone Marrow | | | | pSport1 |
| | Cell, untreated | Stromal | | | | |
| | | Cell, untreated | | | | |
| S0214 | Human Osteoclastoma, re- | Osteoclastoma | bone | | disease | Uni-ZAP XR |
| | excision | | | | | |
| S0216 | Neutrophils IL-1 and LPS | human neutrophil | blood | Cell Line | | Uni-ZAP XR |
| | induced | induced | | | | |
| S0218 | Apoptotic T-cell, re- | apoptotic cells | | Cell Line | | Uni-ZAP XR |
| | excision | | | | | |
| S0222 | H. Frontal | H. Brain, Frontal | Brain | | disease | Uni-ZAP XR |
| | cortex, epileptic;re- | Cortex, Epileptic | | | | |
| | excision | | | | | |
| S0228 | PSMIX | PBLS, 7TM | | | | PCRII |
| | receptor enriched | | | | | |
| S0242 | Synovial Fibroblasts | Synovial Fibroblasts | | | | pSport1 |
| | (I11/TNF), subt | | | | | |
| S0250 | Human Osteoblasts II | Human Osteoblasts | Femur | | disease | pCMVSport 2.0 |
| S0252 | 7TM-PIMIX | PBLS, 7TM | | | | PCRII |
| | | receptor enriched | | | | |
| S0260 | Spinal Cord, re-excision | Spinal cord | spinal cord | | | Uni-ZAP XR |
| S0264 | PPMIX | PPMIX (Human | Pituitary | | | PCRII |
| | | Pituitary) | | | | |
| S0268 | PRMIX | PRMIX (Human | prostate | | | PCRII |
| | | Prostate) | | | | |
| S0270 | PTMIX | PTMIX (Human | Thymus | | | PCRII |
| | | Thymus) | | | | |
| S0274 | PCMIX | PCMIX (Human | Brain | | | PCRII |
| | | Cerebellum) | | | | |
| S0276 | Synovial hypoxia-RSF | Synovial fobroblasts | Synovial | | | pSport1 |
| | subtracted | (rheumatoid) | tissue | | | |
| S0278 | H Macrophage (GM-CSF | Macrophage (GM- | | | | Uni-ZAP XR |
| | treated), re-excision | CSF treated) | | | | |
| S0280 | Human Adipose Tissue, | Human Adipose | | | | Uni-ZAP XR |
| | re-excision | Tissue | | | | |
| S0282 | Brain Frontal Cortex, re- | Brain frontal cortex | Brain | | | Lambda ZAP 11 |
| | excision | | | | | |
| S0292 | Osteoarthritis (OA-4) | Human | Bone | | disease | pSport1 |
| | | Osteoarthritis | | | | |
| | | Cartilage | | | | |
| S0300 | Frontal lobe,dementia;re- | Frontal Lobe | Brain | | | Uni-ZAP XR |
| | excision | demential Alzheimer”s | | | | |
| S0308 | Spleen/normal | Spleen normal | | | | pSport1 |
| S0310 | Normal trachea | Normal trachea | | | | pSport1 |
| S0314 | Human | Human | | | disease | pSport1 |
| | osteoarthritis;fraction I | osteoarthritic | | | | |
| | | cartilage | | | | |
| S0316 | Human Normal | Human Normal | | | | pSport1 |
| | Cartilage, Fraction I | Cartilage | | | | |
| S0318 | Human Normal Cartilage | Human Normal | | | | pSport1 |
| | Fraction II | Cartilage | | | | |
| S0328 | Palate carcinoma | Palate carcinoma | Uvula | | disease | pSport1 |
| S0330 | Palate normal | Palate normal | Uvula | | | pSport1 |
| S0338 | Human Osteoarthritic | Human | | | disease | pSport1 |
| | Cartilage Fraction III | osteoarthritic | | | | |
| | cartilage | | | | | |
| S0340 | Human Osteoarthritic | Human | | | disease | pSport1 |
| | Cartilage Fraction IV | osteoarthritic | | | | |
| | | cartilage | | | | |
| S0342 | Adipocytes;re-excision | Human Adipocytes | | | | Uni-ZAP XR |
| | | from Osteoclastoma | | | | |
| S0344 | Macrophage-oxLDL;re- | macrophage- | blood | Cell Line | | Uni-ZAP XR |
| | excision | oxidized LDL | | | | |
| | | treated | | | | |
| S0346 | Human Amygdala;re- | Amygdala | | | | Uni-ZAP XR |
| | excision | | | | | |
| S0350 | Pharynx Carcinoma | Pharynx carcinoma | Hypopharyox | | disease | pSport1 |
| S0352 | Larynx Carcinoma | Larynx carcinoma | | | disease | pSport1 |
| S0354 | Colon Normal II | Colon Normal | Colon | | | pSport1 |
| S0356 | Colon Carcinoma | Colon Carcinoma | Colon | | disease | pSport1 |
| S0358 | Colon Normal III | Colon Normal | Colon | | | pSport1 |
| S0360 | Colon Tumor II | Colon Tumor | Colon | | disease | pSport1 |
| S0362 | Human Gastrocnemius | Gastrocnemius | | | | pSport1 |
| | muscle | | | | | |
| S0364 | Human Quadriceps | Quadriceps muscle | | | | pSport1 |
| S0366 | Human Soleus | Soleus Muscle | | | | pSport1 |
| S0368 | Human Pancreatic | Islets of Langerhans | | | | pSport1 |
| | Langerhans | | | | | |
| S0370 | Larynx carcinoma II | Larynx carcinoma | | | disease | pSport1 |
| S0372 | Larynx carcinoma III | Larynx carcinoma | | | disease | pSport1 |
| S0374 | Normal colon | Normal colon | | | | pSport1 |
| S0376 | Colon Tumor | Colon Tumor | | | disease | pSport1 |
| S0378 | Pancreas normal | PCA4 Pancreas Normal | | | | pSport1 |
| | No | PCA4No | | | | |
| S0380 | Pancreas Tumor PCA4 | Tu Pancreas Tumor | | | disease | pSport1 |
| | | PCA4Tu | | | | |
| S0384 | Tongue carcinoma | Tongue carcinoma | | | disease | pSport1 |
| S0386 | Human Whole Brain, re- | Whole brain | Brain | | | ZAP Express |
| | excision | | | | | |
| S0388 | Human | Human | | | disease | Uni-ZAP XR |
| | Hypothalamus,schizophre | Hypothalamus, | | | | |
| | nia, re-excision | Schizophrenia | | | | |
| S0390 | Smooth muscle, control; | Smooth muscle | Pulmanary | Cell Line | | Uni-ZAP XR |
| | re-excision | | artery | | | |
| S0392 | Salivary Gland | Salivary gland; | | | | pSport1 |
| | | normal | | | | |
| S0402 | Adrenal Gland,normal | Adrenal gland; | | | | pSport1 |
| | | normal | | | | |
| S0404 | Rectum normal | Rectum, normal | | | | pSport1 |
| S0406 | Rectum tumour | Rectum tumour | | | | pSport1 |
| S0408 | Colon, normal | Colon, normal | | | | pSport1 |
| S0410 | Colon, tumour | Colon, tumour | | | | pSport1 |
| S0412 | Temporal cortex- | Temporal cortex, | | | disease | Other |
| | Alzheizmer;subtracted | alzheimer | | | | |
| S0414 | Hippocampus, Alzheimer | Hippocampus, | | | | Other |
| | Subtracted | Alzheimer | | | | |
| | | Subtracted | | | | |
| S0418 | CHME Cell Line;treated 5 | CHME Cell Line; | | | | pCMVSport 3.0 |
| | hrs | treated | | | | |
| S0420 | CHME Cell | CHME Cell line, | | | | pSport1 |
| | Line, untreated | untreatetd | | | | |
| S0422 | Mo7e Cell Line GM-CSF | Mo7e Cell Line | | | | pCMVSport 3.0 |
| | treated (1ng/ml) | GM-CSF treated | | | | |
| | (1ng/ml) | | | | | |
| S0424 | TF-1 Cell Line GM-CSF | TF-1 Cell Line | | | | pSport1 |
| | Treated | GM-CS F Treated | | | | |
| S0426 | Monocyte activated, re- | Monocyte-activated | blood | Cell Line | | Uni-ZAP XR |
| | excision | | | | | |
| S0428 | Neutrophils control;re- | human neutrophils | blood | Cell Line | | Uni-ZAP XR |
| | excision | | | | | |
| S0430 | Aryepiglottis Normal | Aryepiglottis | | | | pSport1 |
| | | Normal | | | | |
| S0432 | Sinus piaiformis Tumour | Sinus piniformis | | | | pSport1 |
| | | Tumour | | | | |
| S0434 | Stomach Normal | Stomach Normal | | | disease | pSport1 |
| S0436 | Stomach Tumour | Stomach Tumour | | | disease | pSport1 |
| S0438 | Liver Normal Met5No | Liver Normal | | | | pSport1 |
| | Met5No | | | | | |
| S0442 | Colon Normal | Colon Normal | | | | pSport1 |
| S0444 | Colon Tumor | Colon Tumour | | | disease | pSport1 |
| S0448 | Larynx Normal | Larynx Normal | | | | pSport1 |
| S0450 | Larynx Tumour | Larynx Tumour | | | | pSport1 |
| S0452 | Thymus | Thymus | | | | pSport1 |
| S0456 | Tongue Normal | Tongue Normal | | | | pSport1 |
| S0458 | Thyroid Normal (SDCA2 | Thyroid normal | | | | pSport1 |
| | No) | | | | | |
| S0462 | Thyroid Thyroidius | Thyroid Thyroiditis | | | | pSport1 |
| S0464 | Larynx Normal | Larynx Normal | | | | pSport1 |
| S0468 | Ea.hy.926 cell line | Ea.hy.926 cell line | | | | pSport1 |
| S0472 | Lung Mesothelium | PYBT | | | | pSport1 |
| S0474 | Human blood platelets | Platelets | Blood | Other | | |
| | | platelets | | | | |
| S0665 | Human Amygdala;re- | Amygdala | | | | Uni-ZAP XR |
| | excission | | | | | |
| S3012 | Smooth Muscle Serum | Smooth muscle | Pulmanary | Cell Line | | pBluescript |
| | Treated, Norm | | artery | | | |
| S3014 | Smooth muscle, serum | Smooth muscle | Pulmanary | Cell Line | | pBluescript |
| | induced, re-exc | | artery | | | |
| S6016 | H. Frontal Cortex, | H. Brain, Frontal | Brain | | disease | Uni-ZAP XR |
| | Epileptic | Cortex, Epileptic | | | | |
| S6022 | H. Adipose Tissue | Human Adipose | | | | Uni-ZAP XR |
| | Tissue | | | | | |
| S6024 | Alzheimers, spongy | Alzheimer”s/Spongy | Brain | | disease | Uni-ZAP XR |
| | change | change | | | | |
| S6026 | Frontal Lobe, Dementia | Frontal Lobe | Brain | | | Uni-ZAP XR |
| | | dementialAlzheimer's | | | | |
| S6028 | Human Manic Depression | Human Manic | Brain | | disease | Uni-ZAP XR |
| | Tissue | depression tissue | | | | |
| T0002 | Activated T-cells | Activated T-Cell, Blood | Cell Line | | | pBluescript SK- |
| | | PBL fraction | | | | |
| T0003 | Human Fetal Lung | Human Fetal Lung | | | | pBluescript SK- |
| T0004 | Human White Fat | Human White Fat | | | | pBluescript SK- |
| T0006 | Human Pineal Gland | Human Pinneal | | | | pBluescript SK- |
| | | Gland | | | | |
| T0010 | Human Infant Brain | Human Infant Brain | | | | Other |
| T0023 | Human Pancreatic | Human Pancreatic | | | disease | pBluescript SK- |
| | Carcinoma | Carcinoma | | | | |
| T0039 | HSA 172 Cells | Human HSA 172 cell | | | | pBluescript SK- |
| | | line | | | | |
| T0041 | Jurkat T-cell G1 phase | Jurkat T-cell | | | | pBluescript SK- |
| T0042 | Jurkat T-Cell, S phase | Jurkat T-Cell Line | | | | pBluescript SK- |
| T0048 | Human Aortic | Human Aortic | | | | pBluescript SK- |
| | Endothelium | Endothilium | | | | |
| T0049 | Aorta endothelial cells + | Aorta endothelial | | | | pBluescript SK- |
| | TNF-a | cells | | | | |
| T0060 | Human White Adipose | Human White Fat | | | | pBluescript SK- |
| T0067 | Human Thyroid | Human Thyroid | | | | pBluescript SK- |
| T0069 | Human Uterus, normal | Human Uterus, | | | | pBluescript SK- |
| | | normal | | | | |
| T0071 | Human Bone Marrow | Human Bone | | | | pBluescript SK- |
| | | Marrow | | | | |
| T0082 | Human Adult Retina | Human Adult Retina | | | | pBluescript SK- |
| T0086 | Human Pancreatic | Human Pancreatic | | | disease | pBluescript SK |
| | Carcinoma -- Screened | Carcinoma | | | | |
| T0110 | Human colon carcinoma | | | | | pBluescript SK- |
| | (HCC) cell line, remake | | | | | |
| T0112 | Human (Caco-2) cell line. | | | | | pBluescript SK- |
| | adenocarcinoma, colon | | | | | |
| T0114 | Human (Caco-2) cell line. | | | | | pBluescript SK- |
| | adenocarcinoma, colon, | | | | | |
| | remake | | | | | |
| T0115 | Human Colon Carcinoma | | | | | pBluescript SK |
| | (HCC) cell line | | | | | |
| L0002 | Atrium cDNA library | | | | | |
| | Human heart | | | | | |
| L0005 | Clontech human aorta | | | | | |
| | polyA+ mRNA (#6572) | | | | | |
| L0021 | Human adult (K.Okubo) | | | | | |
| L0022 | Human adult lung 3” | | | | | |
| | directed Mbol cDNA | | | | | |
| L0040 | Human colon mucosa | | | | | |
| L0055 | Human promyelocyte | | | | | |
| L0065 | Liver HepG2 cell line. | | | | | |
| L0103 | DKFZphamy 1 amygdala | | | | | |
| L010S | Human aorta polyA+ | aorta | | | | |
| | (TFujiwara) | | | | | |
| L0106 | Human bone marrow | bone marrow | | | | |
| | (Bi,A.) | | | | | |
| L0109 | Human brain cDNA | brain | | | | |
| L0142 | Human placenta cDNA | placenta | | | | |
| | (TFujiwara) | | | | | |
| L0143 | Human placenta polyA+ | placenta | | | | |
| | (TFujiwara) | | | | | |
| L0157 | Human fetal brain | | brain | | | |
| | (TFujiwara) | | | | | |
| L0163 | Human heart cDNA | | heart | | | |
| | (YNakamura) | | | | | |
| L0177 | Human newborn | | | Clonetics | | |
| | melanocytes (T.Vogt) | | | Corp. | | |
| | | | | (San | | |
| | | | | Diego, | | |
| | | | | CA) | | |
| | | | | strain #68 | | |
| | | | | and 2486 | | |
| L0179 | Human lung | lung | | GLC-82 | | |
| | adenocarcinoma (M.Wu) | adenocarcinoma | | | | |
| L0194 | Human pancreatic cancer | pancreatic cancer | | Patu | | |
| | cell line Patu 8988t | | | 8988t | | |
| L0351 | Infant brain, Bento Soares | | | | | BA, M13- |
| | | | | | | denved |
| L0352 | Normalized infant brain, | | | | | BA, M13- |
| | Bento Soares | | | | | derived |
| L0356 | S. Human foetal Adrenals | | | | | Bluescript |
| | tissue | | | | | |
| L0361 | Stratagene ovary | | ovary | | | Bluescript SK |
| | (#937217) | | | | | |
| L0485 | STRATAGENE Human | skeletal muscle | leg muscle | | | Lambda ZAPII |
| | skeletal muscle cDNA | | | | | |
| | library, cat. #936215. | | | | | |
| L0499 | NCI_CGAP_HSC2 | stem cell 34+/38+ | bone marrow | | pAMP1 | |
| L0500 | NCI_CGAP_Brn2O | oligodendroglioma brain | | | pAMP1 | |
| L0509 | NCI_CGAP_Lu26 | invasive lung | | | pAMP1 | |
| | | adenocarcinoma | | | | |
| L0512 | NCI_CGAP_0v36 | borderline ovarian | ovary | | | pAMP1 |
| | | carcinoma | | | | |
| L0515 | NCI_CGAP_0v32 | papillary serous | ovary | | | pAMP1 |
| | | carcinoma | | | | |
| L0517 | NCI_CGAP_Pr1 | | | | | pAMP10 |
| L0518 | NCI_CGAP Pr2 | | | | | pAMP10 |
| L0519 | NCI_CGAP_Pr3 | | | | | pAMP10 |
| L0520 | NCI_CGAP_Alv1 | alveolar | | | | pAMP10 |
| | | rhabdomyosarcoma | | | | |
| L0521 | NCI_CGAP Ewl | Ewing”s sarcoma | | | | pAMP10 |
| L052S | NCI_CGAP_Li2 | liver | | pAMP1O | | |
| L0526 | NCI_CGAP_Pr12 | metastauc prostate | | | | pAMP10 |
| | bone lesion | | | | | |
| L0527 | NCI_CGAP_0v2 | ovary | | pAMP10 | | |
| L0528 | NCI_CGAP_Pr8 | prostate | | pAMP10 | | |
| L0529 | NCI_CGAP_Pr5 | prostate | | pAMP10 | | |
| L053O | NCI_CGAP_Pr8 | prostate | | pAMP10 | | |
| L0534 | Chromosome 7 Fetal | brain brain | | | | pAMP10 |
| | | Brain cDNA Library | | | | |
| L0535 | NCI_CGAP_Br5 | infiltrating | ductal breast | | | pAMP10 |
| | | carcinoma | | | | |
| L0542 | NCI_CGAP_Pr11 | normal prostatic | prostate | | | pAMP10 |
| | | epithelial cells | | | | |
| L0543 | NCI_CGAP_Pr9 | normal prostatic | prostate | | | pAMP10 |
| | | epithelial cells | | | | |
| L0544 | NCI_CGAP_Pr4 | prostatic | prostate | | | pAMP10 |
| | | intraepithelial | | | | |
| | | neoplasia - high | | | | |
| | | grade | | | | |
| L0545 | NCI_CGAP_Pr4.1 | prostatic | prostate | | | pAMP10 |
| | | intraepithelial | | | | |
| | | neoplasia high | | | | |
| | | grade | | | | |
| L0549 | NCI_CGAP_HN10 | carcinoma in situ | | | | pAMP10 |
| | | from retromolar | | | | |
| | | trigone | | | | |
| L0551 | NCI_CGAP_HN7 | normal squamous | | | | pAMP10 |
| | | epithelium, floor of | | | | |
| | | mouth | | | | |
| L0564 | Jia bone marrow stroma | bone marrow stroma | | | | pBluescript |
| L0565 | Normal Human | Bone | Hip | | | pBluescript |
| | Trabecular Bone Cells | | | | | |
| L0581 | Stratagene liver (#937224) | | liver | | | pBluescript SK |
| L0586 | HTCDL1 | | | | | pBluescript |
| | | | | | | SK(-) |
| L0588 | Stratagene endothelial cell | | | | | pBluescript SK |
| | 937223 | | | | | |
| L0589 | Stratagene fetal retina | | | | | pBluescript SK- |
| | 937202 | | | | | |
| L0590 | Stratagene fibroblast | | | | | pBluescript SK- |
| | (#937212) | | | | | |
| L0591 | Stratagene HeLa cell s3 | | | | | pBluescript SK- |
| | 937216 | | | | | |
| L0592 | Stratagene hNT neuron | | | | | pBluescript SK- |
| | (#937233) | | | | | |
| L0593 | Stratagene | | | | | pBluescript SK- |
| | neuroepithelium | | | | | |
| | (#937231) | | | | | |
| L0594 | Stratagene | | | | | pBluescrspt SK- |
| | neuroepithelium | | | | | |
| | NT2RAMI 937234 | | | | | |
| L0595 | Stratagene NT2 neuronal | neuroepithbelial cells | brain | | | pBluescrspt SK- |
| | precursor 937230 | | | | | |
| L0596 | Stratagene colon | | colon | | | pBluescript SK- |
| | (#937204) | | | | | |
| L0598 | Morton Fetal Cochlea | cochlea | ear | | | pBluescript SK- |
| L0599 | Stratagene lung (#937210) | | lung | | | pBluescript SK- |
| L0600 | Weizmann Olfactory | olfactory epithelium | nose | | | pBluescript SK- |
| | Epithelium | | | | | |
| L0601 | Stratagene pancreas | | pancreas | | | pBluescript SK- |
| | (#937208) | | | | | |
| L0602 | Pancreatic Islet | pancreatic islet | pancreas | | | pBluescript SK- |
| L0603 | Stratagene placenta | | placenta | | | pBluescript SK- |
| | (#937225) | | | | | |
| L0604 | Stratagene muscle 937209 | muscle | skeletal | | | pBluescript SK- |
| | | | muscle | | | |
| L0605 | Stratagene fetal spleen | fetal spleen | spleen | | | pBluescript SK- |
| | (#937205) | | | | | |
| L0606 | NCI_CGAP_Lym5 | follicular lymphoma | lymph node | | | pBluescript SK- |
| L0607 | NCI_CGAP_Lym6 | mantle cell | lymph node | | | pBluescript SK- |
| | | lymphoma | | | | |
| L0608 | Stratagene lung carcinoma | lung carcinoma | lung | NCI-H69 | | pBluescript SK- |
| | 937218 | | | | | |
| L0618 | Chromosome 9 exon | | | | | pBluescriptIIKS |
| | | | | | | + |
| L0619 | Chromosome 9 exon II | | | | | pBluescriptIIKS |
| | | | | | | + |
| L0622 | HM1 | | | | | pcDNAII |
| | | | | | | (Invitrogen) |
| L0623 | HM3 | pectoral muscle | | | | pCDNAII |
| | | (after mastectomy) | | | | (Invitrogen) |
| L0629 | NCI_CGAP_Mel3 | metastatic | bowel (skin | | | pCMV-SPORT4 |
| | | melanoma to bowel | primary) | | | |
| L0630 | NCI_CGAP_CNS1 | substantia nigra | brain | | | pCMV-SPORT4 |
| L0631 | NCI_CGAP_Br7 | | breast | | | pCMV-SPORT4 |
| L0634 | NCI_CGAP_0v8 | serous | ovary | | | pCMV-SPORT4 |
| | | adenocarcinoma | | | | |
| L0635 | NCI_CGAP_PNS1 | dorsal root ganglion | peripheral | | | pCMV-SPORT4 |
| | | | nervous | | | |
| | | | system | | | |
| L0636 | NCI_CGAP_Pit1 | four pooled pituitary | brain | | | pCMV-SPORT6 |
| | | adenomas | | | | |
| L0637 | NCI_CGAP_Brn53 | three pooled | brain | | | pCMV-SPORT6 |
| | | meningiomas | | | | |
| L0638 | NCI_CGAP_Brn35 | tumor, 5 pooled (see | brain | | | pCMV-SPORT6 |
| | | description) | | | | |
| L0639 | NCI_CGAP_Brn52 | tumor, 5 pooled (see | brain | | | pCMV-SPORT6 |
| | | description) | | | | |
| L0640 | NCI_CGAP_Br18 | four pooled high- | breast | | | pCMV-SPORT6 |
| | | grade tumors, | | | | |
| | | including two prima | | | | |
| L0641 | NCI_CGAP_Co17 | juvenile granulosa | colon | | | pCMV-SPORT6 |
| | | tumor | | | | |
| L0642 | NCI_CGAP_Co18 | moderately | colon | | | pCMV-SPORT6 |
| | | differentiated | | | | |
| | | adenocarcinoma | | | | |
| L0643 | NCI_CGAP_Co19 | moderately | colon | | | pCMV-SPORT6 |
| | | differentiated | | | | |
| | | adenocarcinoma | | | | |
| L0644 | NCI_CGAP_Co20 | moderately | colon | | | pCMV-SPORT6 |
| | | differentiated | | | | |
| | | adenocarcinoma | | | | |
| L0645 | NCI_CGAP_Co21 | moderately | colon | | | pCMV-SPORT6 |
| | | differentiated | | | | |
| | | adenocarcinoma | | | | |
| L0646 | NCI_CGAP_Co14 | moderately- | colon | | | pCMV-SPORT6 |
| | | differentiated | | | | |
| | | adenocarcinoma | | | | |
| L0647 | NCI_CGAP_Sar4 | five pooled | connective | | | pCMV-SPORT6 |
| | | sarcomas, including | tissue | | | |
| | | myxoid liposarcoma | | | | |
| L0648 | NCI_CGAP_Eso2 | squamous cell | esophagus | | | pCMV-SPORT6 |
| | | carcinoma | | | | |
| L0649 | NCI_CGAP_GU1 | 2 pooled high-grade | genitourinary | | | pCMV-SPORT6 |
| | | transitional cell | tract | | | |
| | | tumors | | | | |
| L0650 | NCI_CGAP_Kid13 | 2 pooled Wilms” | kidney | | | pCMV-SPORT6 |
| | | tumors, one primary | | | | |
| | | and one metast | | | | |
| L0651 | NCI_CGAP_Kid8 | renal cell tumor | kidney | | | pCMV-SPORT6 |
| L0653 | NCI_CGAP_Lu28 | two pooled | lung | | | pCMV-SPORT6 |
| | | squamous cell | | | | |
| | | carcinomas | | | | |
| L0654 | NCI_CGAP_Lu31 | | lung, cell line | | | pCMV-SPORT6 |
| L0655 | NCI_CGAP_Lym12 | lymphoma, | lymph node | | | pCMV-SPORT6 |
| | | follicular mixed | | | | |
| | | small and large cell | | | | |
| L0656 | NCI_CGAP_0v38 | normal epithelium | ovary | | | pCMV-SPORT6 |
| L0657 | NCI_CGAP_0v23 | tumor, 5 pooled (see | ovary | | | pCMV-SPORT6 |
| | | description) | | | | |
| L0658 | NCI_CGAP_0v35 | tumor, 5 pooled (see | ovary | | | pCMV-SPORT6 |
| | | description) | | | | |
| L0659 | NCI_CGAP_Pan1 | adenocarcinoma | pancreas | | | pCMV-SPORT6 |
| L0661 | NCI_CGAP_Mel 15 | malignant | skin | | | pCMV-SPORT6 |
| | | melanoma, | | | | |
| | | metastatic to lymph | | | | |
| | | node | | | | |
| L0662 | NCI_CGAP_Gas4 | poorly differentiated | stomach | | | pCMV-SPORT6 |
| | | adenocarcinoma | | | | |
| | | with signet r | | | | |
| L0663 | NCI_CGAP_Ut2 | moderately- | uterus | | | pCMV-SPORT6 |
| | | differentiated | | | | |
| | | endometrial | | | | |
| | | adenocarcino | | | | |
| L0664 | NCI_CGAP_Ut3 | poorly-differentiated | uterus | | | pCMV-SPORT6 |
| | | endometrial | | | | |
| | | adenocarcinoma, | | | | |
| L0665 | NCI_CGAP_Ut4 | serous papillary | uterus | | | pCMV-SPORT6 |
| | | carcinoma, high | | | | |
| | | grade, 2 pooled t | | | | |
| L0666 | NCI_CGAP_Ut1 | well-differentiated | uterus | | | pCMV-SPORT6 |
| | | endometrial | | | | |
| | | adenocarcinoma, 7 | | | | |
| L0667 | NCI_CGAP_CML1 | myeloid cells, 18 | whole blood | | | pCMV-SPORT6 |
| | | pooled CML cases, | | | | |
| | | BCR/ABL rearra | | | | |
| L0681 | Stanley Frontal SN | frontal lobe (see | brain | | | pCR2.1 |
| | individual | description) | | | | (Invitrogen) |
| L0697 | Testis 1 | | | | | PGEM 5zf(+) |
| L0698 | Testis 2 | | | | | PGEM 5zf(+) |
| L0717 | Gessler Wilms tumor | | | | | pSPORT1 |
| L0720 | PN001-Normal Human | | prostate | | | pSport1 |
| | Prostate | | | | | |
| L0731 | Soares_pregnant_uterus_{—} | | uterus | | | pT7T3-Pac |
| | | NbHPU | | | | |
| L0738 | Human colorectal cancer | | | | | pT7T3D |
| L0740 | Soares melanocyte | melanocyte | | | | pT7T3D |
| | 2NbHM | polylinker | | | | |
| L0741 | Soares adult brain | | brain | | | pT7T3D |
| | N2b4HB55Y | | | | | (Pharmacia) |
| | | | | | | with a modified |
| | | | | | | polylinker |
| L0742 | Soares adult brain | | brain | | | pT7T3D |
| | N2b5HB55Y | | | | | (Pharmacia) |
| | | | | | | with a modified |
| | | | | | | polylinker |
| L0743 | Soares breast 2NbHBst | | breast | | | pT7T3D |
| | | | | | | (Pharmacia) |
| | | | | | | with a modified |
| | | | | | | polylinker |
| L0744 | Soares breast 3NbHBst | | breast | | | pT7T3D |
| | | | | | | (Pharmacia) |
| | | | | | | with a modified |
| | | | | | | polylinker |
| L0745 | Soares retina N2b4HR | retina | eye | | | pT7T3D |
| | | | | | | (Pharmacia) |
| | | | | | | with a modified |
| | | | | | | polylinker |
| L0746 | Soares retina N2b5HR | retina | eye | | | pT7T3D |
| | | | | | | (Pharmacia) |
| | | | | | | with a modified |
| | | | | | | polylinker |
| L0747 | Soares_fetal_heart_NbHH | | heart | | | pT7T3D |
| | 19W | | | | | (Pharmacia) |
| | | | | | | with a modified |
| | | | | | | polylinker |
| L0748 | Soares fetal liver spleen | | Liver and | | | pT7T3D |
| | 1NFLS | Spleen | | | | (Pharmacia) |
| | | | | | | with a modified |
| | | | | | | polylinker |
| L0749 | Soares_fetal_liver_spleen | | Liver and | | | pT7T3D |
| | _1NFLS_S1 | | Spleen | | | (Pharmacia) |
| | | | | | | with a modified |
| | | | | | | polylinker |
| L0750 | Soares_fetal_lung_NbHL1 | | lung | | | pT7T3D |
| | 9W | | | | | (Pharmacia) |
| | | | | | | with a modified |
| | | | | | | polylinker |
| L0751 | Soares ovary tumor | ovarian tumor | ovary | | | pT7T3D |
| | NbHOT | | | | | (Pharmacia) |
| | | | | | | with a modified |
| | | | | | | polylinker |
| L0752 | Soares_parathyroid_tumor | parathyroid tumor | parathyroid | | | pT7T3D |
| | NbHPA | | gland | | | (Pharmacia) |
| | | | | | | with a modified |
| | | | | | | polylinker |
| L0753 | Soares_pineal_gland_N3H | | pineal gland | | | pT7T3D |
| | PG | | | | | (Pharmacia) |
| | | | | | | with a modified |
| | | | | | | polylinker |
| L0754 | Soares placenta Nb2HP | | placenta | | | pT7T3D |
| | | | | | | (Pharmacia) |
| | | | | | | with a modified |
| | | | | | | polylinker |
| L0755 | Soares_placenta_8to9wee | | placenta | | | pT7T3D |
| | ks_2NbHPSto9W | | | | | (Pharmacia) |
| | | | | | | with a modified |
| | | | | | | polylinker |
| L0756 | Soares_multiple_sclerosis | multiple sclerosis | | | | pT7T3D |
| | 2NbHMSP | lesions | | | | (Pharmacia) |
| | | | | | | with a modified |
| | | | | | | polylinker |
| | | | | | | V TYPE |
| L0757 | Soares_senescent_fibrobla | senescent fibroblast | | | | pT7T3D |
| | sts_NbHSF | | | | | (Pharmacia) |
| | | | | | | with a modified |
| | | | | | | polylinker |
| | | | | | | VTYPE |
| L0758 | Soares_testis_NHT | | | | | pT7T3D-Pac |
| | | | | | | (Pharmacia) |
| | | | | | | with a modified |
| | | | | | | polylinker |
| L0759 | Soares_total_fetus_Nb2H | | | | | pT7T3D-Pac |
| | F89w | | | | | (Pharmacia) |
| | | | | | | with a modified |
| | | | | | | polylinker |
| L0761 | NCI_CGAP_CLL1 | B-cell, chronic | | | | pT7T3D-Pac |
| | lymphouc leukemia | | | | | (Pharmacia) |
| | | | | | | with a modified |
| | | | | | | polylinker |
| L0762 | NCI_CGAP_Br1.1 | breast | | | | pT7T3D-Pac |
| | | | | | | (Pharmacia) |
| | | | | | | with a modified |
| | | | | | | polylinker |
| L0763 | NCI_CGAP_Br2 | breast | | | | pT7T3D-Pac |
| | | | | | | (Pharmacia) |
| | | | | | | with a modified |
| | | | | | | polylinker |
| L0764 | NCI_CGAP_Co3 | colon | | | | pT7T3D-Pac |
| | | | | | | (Pharmacia) |
| | | | | | | with a modified |
| | | | | | | polylinker |
| L0765 | NCI_CGAP_Co4 | colon | | | | pT7T3D-Pac |
| | | | | | | (Pharmacia) |
| | | | | | | with a modified |
| | | | | | | polylinker |
| L0766 | NCI_CGAP_GCB1 | germinal center B | | | | pT7T3D-Pac |
| | | cell | | | | (Pharmacia) |
| | | | | | | with a modified |
| | | | | | | polylinker |
| L0767 | NCI_CGAP_GC3 | pooled germ cell | | | | pT7T3D-Pac |
| | tumors | | | | | (Pharmacia) |
| | | | | | | with a modified |
| | | | | | | polylinker |
| L0768 | NCI_CGAP_GC4 | pooled germ cell | | | | pT7T3D-Pac |
| | tumors | | | | | (Pharmacia) |
| | | | | | | with a modified |
| | | | | | | polylinker |
| L0769 | NCI_CGAP_Brn5 | anaplastic | brain | | | pT7T3D-Pac |
| | | oligodendroglioma | | | | (Pharmacia) |
| | | | | | | with a modified |
| | | | | | | polylinker |
| L0770 | NCI_CGAP_Brn23 | glioblastoma | brain | | | pT7T3D-Pac |
| | | (pooled) | | | | (Pharmacia) |
| | | | | | | with a modified |
| | | | | | | polylinker |
| L0771 | NCI_CGAP_Co8 | adenocarcinoma | colon | | | pT7T3D-Pac |
| | | | | | | (Pharmacia) |
| | | | | | | with a modified |
| | | | | | | polylinker |
| L0772 | NCI_CGAP_Co10 | colon tumor RER+ | colon | | | pT7T3D-Pac |
| | | | | | | (Pharmacia) |
| | | | | | | with a modified |
| | | | | | | polylinker |
| L0773 | NCI_CGAP_Co9 | colon tumor RER+ | colon | | | pT7T3D-Pac |
| | | | | | | (Pharmacia) |
| | | | | | | with a modified |
| | | | | | | polylinker |
| L0774 | NCI_CGAP_Kid3 | | kidney | | | pT713D-Pac |
| | | | | | | (Pharmacia) |
| | | | | | | with a modified |
| | | | | | | polylinker |
| L0775 | NCI_CGAP_Kid5 | 2 pooled tumors | kidney | | | pT7T3D-Pac |
| | | (clear cell type) | | | | (Pharmacia) |
| | | | | | | with a modified |
| | | | | | | polylinker |
| L0776 | NCI_CGAP_Lu5 | carcinoid | lung | | | pT7T3D-Pac |
| | | | | | | (Pharmacia) |
| | | | | | | with a modified |
| | | | | | | polylinker |
| L0777 | Soares_NhHMPu_S1 | Pooled human | mixed (see | | | pT7T3D-Pac |
| | melanocyte, fetal | below) | | | | (Pharmacia) |
| | heart, and pregnant | | | | | with a modified |
| | | | | | | polylinker |
| L0779 | Soares_NFL_T_GBC_S1 | | pooled | | | pT7T3D-Pac |
| | | | | | | (Pharmacia) |
| | | | | | | with a modified |
| | | | | | | polylinker |
| L0780 | Soares_NSF_F8_9W_OT | | pooled | | | pT7T3D-Pac |
| | PA_P_Si | | | | | (Pharmacia) |
| | | | | | | with a modified |
| | | | | | | polylinker |
| L0782 | NCI_CGAP_Pr21 | normal prostate | prostate | | | pT7T3D-Pac |
| | | | | | | (Pharmacia) |
| | | | | | | with a modified |
| | | | | | | polylinker |
| L0783 | NCI_CGAP_Pr22 | normal prostate | prostate | | | pT7T3D-Pac |
| | | | | | | (Pharmacia) |
| | | | | | | with a modified |
| | | | | | | polylinker |
| L0785 | Barstead spleen HPLRB2 | | spleen | | | pT7T3D-Pac |
| | | | | | | (Pharmacia) |
| | | | | | | with a modified |
| | | | | | | polylinker |
| L0786 | Soares_NbHFB | | whole brain | | | pT7T3D-Pac |
| | | | | | | (Pharmacia) |
| | | | | | | with a modified |
| | | | | | | polylinker |
| L0787 | NCI_CGAP_Sub1 | | | | | pT7T3D-Pac |
| | | | | | | (Pharmacia) |
| | | | | | | with a modified |
| | | | | | | polylinker |
| L0788 | NCI_CGAP_Sub2 | | | | | pT7T3D-Pac |
| | | | | | | (Pharmacia) |
| | | | | | | with a modified |
| | | | | | | polylinker |
| L0789 | NCI_CGAP_Sub3 | | | | | pT7T3D-Pac |
| | | | | | | (Pharmacia) |
| | | | | | | with a modified |
| | | | | | | polylinker |
| L0790 | NCI_CGAP_Sub4 | | | | | pT7T3 D-Pac |
| | | | | | | (Pharmacia) |
| | | | | | | with a modified |
| | | | | | | polylinker |
| L0791 | NCI_CGAP_Sub5 | | | | | pT7T3D-Pac |
| | | | | | | (Pharmacia) |
| | | | | | | with a modified |
| | | | | | | polylinker |
| L0792 | NCI_CGAP_Sub6 | | | | | pT7T3D-Pac |
| | | | | | | (Pharmacia) |
| | | | | | | with a modified |
| | | | | | | polylinker |
| L0793 | NCI_CGAP_Sub7 | | | | | pT7T3D-Pac |
| | | | | | | (Pharmacia) |
| | | | | | | with a modified |
| | | | | | | polylinker |
| L0794 | NCI_CGAP_GC6 | pooled germ cell | | | | pT7T3D-Pac |
| | | tumors | | | | (Pharmacia) |
| | | | | | | with a modified |
| | | | | | | polylinker |
| L0796 | NCI_CGAP_Brn50 | medulloblastoma | brain | | | pT7T3D-Pac |
| | | | | | | (Pharmacia) |
| | | | | | | with a modified |
| | | | | | | polylinker |
| L0800 | NCI_GCAP_Col6 | colon tumor, RER+ | colon | | | pT7T3D-Pac |
| | | | | | | (Pharmacia) |
| | | | | | | with a modified |
| | | | | | | polylinker |
| L0803 | NCI_CGAP_Kid11 | | kidney | | | pT7T3D-Pac |
| | | | | | | (Pharmacia) |
| | | | | | | with a modified |
| | | | | | | polylinker |
| L0804 | NCI_CGAP_Kidl2 | 2 pooled tumors | kidney | | | pT7T3D-Pac |
| | | (clear cell type) | | | | (Pharmacia) |
| | | | | | | with a modified |
| | | | | | | polylinker |
| L0805 | NCI_CGAP_Lu24 | carcinoid | lung | | | pT7T3D-Pac |
| | | | | | | (Pharmacia) |
| | | | | | | with a modified |
| | | | | | | polylinker |
| L0806 | NCI_CGAP_Lu19 | squamous cell | lung | | | pT7T3D-Pac |
| | | carcinoma, poorly | | | | (Pharmacia) |
| | | differentiated (4 | | | | with a modified |
| | | | | | | polylinker |
| L0807 | NCI_CGAP_Ov18 | fibrotheoma | ovary | | | pT7T3D-Pac |
| | | | | | | (Pharmacia) |
| | | | | | | with a modified |
| | | | | | | polylinker |
| L0808 | Barstead prostate BPH | | prostate | | | pT7T3D-Pac |
| | HPLRB4 1 | | | | | (Pharmacia) |
| | | | | | | with a modified |
| | | | | | | polylinker |
| L0809 | NCI_CGAP_Pr28 | | prostate | | | pT7T3D-Pac |
| | | | | | | (Pharmacia) |
| | | | | | | with a modified |
| | | | | | | polylinker |
| L2242 | subtracted 3”EST library | | pancreas | AsPC- | | pUC18 |
| | | | | 1(ATCC: | | |
| | | | | CRL- | | |
| | | | | 1682) | | |
| L2251 | Human fetal lung | Fetal lung | | | | |

[0090] TABLE 5

| OMIM | |
|---|---|
| Reference | Description |
| 104770 | Amyloidosis, secondary, susceptibility to |
| 106165 | Hypertension, essential, 145500 |
| 107280 | Cerebrovascular disease, occlusive |
| 107280 | Alpha-1-antichymotrypsin deficiency |
| 107300 | Antithrombin III deficiency |
| 107400 | Emphysema |
| 107400 | Emphysema-cirrhosis |
| 107670 | Apolipoprotein A-II deficiency |
| 109270 | Renal tubular acidosis, distal, 179800 |
| 109270 | Spherocytosis, hereditary |
| 109270 | [Acanthocytosis, one form] |
| 109270 | [Elliptocytosis, Malaysian-Melanesian type] |
| 109270 | Hemolytic anemia due to band 3 defect |
| 110700 | Vivax malaria, susceptibility to |
| 117700 | [Hypoceruloplasminemia, hereditary] |
| 117700 | Hemosiderosis, systemic, due to aceruloplasminemia |
| 120150 | Osteogenesis imperfecta, 4 clinical forms, 166200, 166210, |
| | 259420, 166220 |
| 120150 | Osteoporosis, idiopathic, 166710 |
| 120150 | Ehlers-Danlos syndrome, type VIIA1, 130060 |
| 122500 | [Transcortin deficiency] |
| 131210 | Atherosclerosis, susceptibility to |
| 135940 | Ichthyosis vulgaris, 146700 |
| 136132 | [Fish-odor syndrome], 602079 |
| 139250 | Isolated growth hormone deficiency, I11ig type with |
| | absent GH and Kowarski type with bioinactive GH |
| 141750 | Alpha-thalassemia/mental retardation syndrome, type 1 |
| 141800 | Methemoglobinemias, alpha- |
| 141800 | Thalassemias, alpha- |
| 141800 | Erythremias, alpha- |
| 141800 | Heinz body anemias, alpha- |
| 141850 | Thalassemia, alpha- |
| 141850 | Erythrocytosis |
| 141850 | Heinz body anemia |
| 141850 | Hemoglobin H disease |
| 141850 | Hypochromic microcytic anemia |
| 145001 | Hyperparathyroidism-jaw tumor syndrome |
| 146790 | Lupus nephritis, susceptibility to |
| 148065 | White sponge nevus, 193900 |
| 148080 | Epidermolytic hyperkeratosis, 113800 |
| 150200 | [Placental lactogen deficiency] |
| 150210 | Lactoferrin-deficient neutrophils, 245480 |
| 150292 | Epidermolysis bullosa, Herlitz junctional type, 226700 |
| 152445 | Vohwinkel syndrome, 124500 |
| 152445 | Erythrokeratoderma, progressive symmetric, 602036 |
| 154275 | Malignant hyperthermia susceptibility 2 |
| 154705 | Marfan syndrome, type II |
| 156850 | Cataract, congenital, with microphthalmia |
| 159001 | Muscular dystrophy, limb-girdle, type 1B |
| 169600 | Hailey-Hailey disease |
| 171190 | Hypertension, essential, 145500 |
| 173610 | Platelet alpha/delta storage pool deficiency |
| 174000 | Medullary cystic kidney disease, AD |
| 176960 | Pituitary tumor, invasive |
| 179755 | Renal cell carcinoma, papillary, 1 |
| 180380 | Night blindness, congenital stationery, rhodopsin-related |
| 180380 | Retinitis pigmentosa, autosomal recessive |
| 180380 | Retinitis pigmentosa-4, autosomal dominant |
| 182860 | Pyropoikilocytosis |
| 182860 | Spherocytosis, recessive |
| 182860 | Elliptocytosis-2 |
| 185800 | Symphalangism, proximal |
| 186580 | Arthrocutaneouveal granulomatosis |
| 186960 | Leukemia/lymphoma, T-cell |
| 190000 | Atransferrinemia |
| 191092 | Tuberous sclerosis-2 |
| 191315 | Insensitivity to pain, congenital, with anhidrosis, 256800 |
| 193300 | Renal cell carcinoma |
| 193300 | von Hippel-Lindau syndrome |
| 203500 | Alkaptonuria |
| 208250 | Jacobs syndrome |
| 221820 | Gliosis, familial progressive subcortical |
| 222900 | Sucrose intolerance |
| 227646 | Fanconi anemia, type D |
| 230800 | Gaucher disease |
| 230800 | Gaucher disease with cardiovascular calcification |
| 232050 | Propionicacidemia, type II or pccB type |
| 233710 | Chronic granulomatous disease due to deficiency of NCF-2 |
| 245200 | Krabbe disease |
| 249000 | Meckel syndrome |
| 253250 | Mulibrey nanism |
| 253260 | Biotinidase deficiency |
| 266200 | Anemia, hemolytic, due to PK deficiency |
| 276902 | Usher syndrome, type 3 |
| 278720 | Xeroderma pigmentosum, group C |
| 600140 | Rubenstein-Taybi syndrome, 180849 |
| 600273 | Polycystic kidney disease, infantile severe, with |
| | tuberous sclerosis |
| 600525 | Trichodontoosseous syndrome, 190320 |
| 600852 | Retinitis pigmentosa-17 |
| 600882 | Charcot-Marie-Tooth neuropathy-2B |
| 600897 | Cataract, zonular pulverulent-1, 116200 |
| 600995 | Nephrotic syndrome, idiopathic, steroid-resistant |
| 601105 | Pycnodysostosis, 265800 |
| 601154 | Cardiomyopathy, dilated, 1E |
| 601199 | Neonatal hyperparathyroidism, 239200 |
| 601199 | Hypocalcemia, autosomal dominant, 601198 |
| 601199 | Hypocalciuric hypercalcemia, type I, 145980 |
| 601253 | Muscular dystrophy, limb-girdle, type IC |
| 601313 | Polycystic kidney disease, adult type I, 173900 |
| 601412 | Deafness, autosomal dominant 7 |
| 601471 | Moebius syndrome-2 |
| 601518 | Prostate cancer, hereditary, 1, 176807 |
| 601652 | Glaucoma 1A, primary open angle, juvenile-onset, 137750 |
| 601682 | Glaucoma 1C, primary open angle |
| 601785 | Carbohydrate-deficient glycoprotein syndrome, type I, 212065 |
| 601841 | Protein C inhibitor deficiency |
| 601844 | Pseudohypoaldosteronism type II |
| 602011 | Pancreatic endocrine tumors |
| 602491 | Hyperlipidemia, familial combined, 1 |

[0091] Polynucleotide and Polypeptide Variants

[0092] The present invention is directed to variants of the polynucleotide sequence disclosed in SEQ ID NO:X or the complementary strand thereto, nucleotide sequences encoding the polypeptide of SEQ ID NO:Y, the nucleotide sequence of SEQ ID NO:X encoding the polypeptide sequence as defined in column 7 of Table 1A, nucleotide sequences encoding the polypeptide as defined in column 7 of Table 1A, the nucleotide sequence as defined in columns 8 and 9 of Table 2, nucleotide sequences encoding the polypeptide encoded by the nucleotide sequence as defined in columns 8 and 9 of Table 2, the nucleotide sequence as defined in column 6 of Table 1B, nucleotide sequences encoding the polypeptide encoded by the nucleotide sequence as defined in column 6 of Table 1B, the cDNA sequence contained in Clone ID NO:Z, and/or nucleotide sequences encoding the polypeptide encoded by the cDNA sequence contained in Clone ID NO:Z.

[0093] The present invention also encompasses variants of the polypeptide sequence disclosed in SEQ ID NO:Y, the polypeptide sequence as defined in column 7 of Table 1A, a polypeptide sequence encoded by the polynucleotide sequence in SEQ ID NO:X, a polypeptide sequence encoded by the nucleotide sequence as defined in columns 8 and 9 of Table 2, a polypeptide sequence encoded by the nucleotide sequence as defined in column 6 of Table 1B, a polypeptide sequence encoded by the complement of the polynucleotide sequence in SEQ ID NO:X, and/or a polypeptide sequence encoded by the cDNA sequence contained in Clone ID NO:Z.

[0094] “Variant” refers to a polynucleotide or polypeptide differing from the polynucleotide or polypeptide of the present invention, but retaining essential properties thereof. Generally, variants are overall closely similar, and, in many regions, identical to the polynucleotide or polypeptide of the present invention.

[0095] Thus, one aspect of the invention provides an isolated nucleic acid molecule comprising, or alternatively consisting of, a polynucleotide having a nucleotide sequence selected from the group consisting of: (a) a nucleotide sequence described in SEQ ID NO:X or contained in the cDNA sequence of Clone ID NO:Z; (b) a nucleotide sequence in SEQ ID NO:X or the cDNA in Clone ID NO:Z which encodes the complete amino acid sequence of SEQ ID NO:Y or the complete amino acid sequence encoded by the cDNA in Clone ID NO:Z; (c) a nucleotide sequence in SEQ ID NO:X or the cDNA in Clone ID NO:Z which encodes a mature polypeptide; (d) a nucleotide sequence in SEQ ID NO:X or the cDNA sequence of Clone ID NO:Z, which encodes a biologically active fragment of a polypeptide; (e) a nucleotide sequence in SEQ ID NO:X or the cDNA sequence of Clone ID NO:Z, which encodes an antigenic fragment of a polypeptide; (f) a nucleotide sequence encoding a polypeptide comprising the complete amino acid sequence of SEQ ID NO:Y or the complete amino acid sequence encoded by the cDNA in Clone ID NO:Z; (g) a nucleotide sequence encoding a mature polypeptide of the amino acid sequence of SEQ ID NO:Y or the amino acid sequence encoded by the cDNA in Clone ID NO:Z; (h) a nucleotide sequence encoding a biologically active fragment of a polypeptide having the complete amino acid sequence of SEQ ID NO:Y or the complete amino acid sequence encoded by the cDNA in Clone ID NO:Z; (i) a nucleotide sequence encoding an antigenic fragment of a polypeptide having the complete amino acid sequence of SEQ ID NO:Y or the complete amino acid sequence encoded by the cDNA in Clone ID NO:Z; and (j) a nucleotide sequence complementary to any of the nucleotide sequences in (a), (b), (c), (d), (e), (f), (g), (h), or (i) above.

[0096] The present invention is also directed to nucleic acid molecules which comprise, or alternatively consist of, a nucleotide sequence which is at least 80%, 85%, 90%, 95%, 96%, 97%, 98%, 99% or 100%, identical to, for example, any of the nucleotide sequences in (a), (b), (c), (d), (e), (f), (g), (h), (i), or (j) above, the nucleotide coding sequence in SEQ ID NO:X or the complementary strand thereto, the nucleotide coding sequence of the cDNA contained in Clone ID NO:Z or the complementary strand thereto, a nucleotide sequence encoding the polypeptide of SEQ ID NO:Y, a nucleotide sequence encoding a polypeptide sequence encoded by the nucleotide sequence in SEQ ID NO:X, a polypeptide sequence encoded by the complement of the polynucleotide sequence in SEQ ID NO:X, a nucleotide sequence encoding the polypeptide encoded by the cDNA contained in Clone ID NO:Z, the nucleotide coding sequence in SEQ ID NO:X as defined in columns 8 and 9 of Table 2 or the complementary strand thereto, a nucleotide sequence encoding the polypeptide encoded by the nucleotide sequence in SEQ ID NO:X as defined in columns 8 and 9 of Table 2 or the complementary strand thereto, the nucleotide coding sequence in SEQ ID NO:B as defined in column 6 of Table 1B or the complementary strand thereto, a nucleotide sequence encoding the polypeptide encoded by the nucleotide sequence in SEQ ID NO:B as defined in column 6 of Table 1B or the complementary strand thereto, the nucleotide sequence in SEQ ID NO:X encoding the polypeptide sequence as defined in column 7 of Table 1A or the complementary strand thereto, nucleotide sequences encoding the polypeptide as defined in column 7 of Table 1A or the complementary strand thereto, and/or polynucleotide fragments of any of these nucleic acid molecules (e.g., those fragments described herein). Polynucleotides which hybridize to the complement of these nucleic acid molecules under stringent hybridization conditions or alternatively, under lower stringency conditions, are also encompassed by the invention, as are polypeptides encoded by these polynucleotides and nucleic acids.

[0097] In a preferred embodiment, the invention encompasses nucleic acid molecules which comprise, or alternatively, consist of a polynucleotide which hybridizes under stringent hybridization conditions, or alternatively, under lower stringency conditions, to a polynucleotide in (a), (b), (c), (d), (e), (f), (g), (h), or (i), above, as are polypeptides encoded by these polynucleotides. In another preferred embodiment, polynucleotides which hybridize to the complement of these nucleic acid molecules under stringent hybridization conditions, or alternatively, under lower stringency conditions, are also encompassed by the invention, as are polypeptides encoded by these polynucleotides.

[0098] In another embodiment, the invention provides a purified protein comprising, or alternatively consisting of, a polypeptide having an amino acid sequence selected from the group consisting of: (a) the complete amino acid sequence of SEQ ID NO:Y or the complete amino acid sequence encoded by the cDNA in Clone ID NO:Z; (b) the amino acid sequence of a mature form of a polypeptide having the amino acid sequence of SEQ ID NO:Y or the amino acid sequence encoded by the cDNA in Clone ID NO:Z; (c) the amino acid sequence of a biologically active fragment of a polypeptide having the complete amino acid sequence of SEQ ID NO:Y or the complete amino acid sequence encoded by the cDNA in Clone ID NO:Z; and (d) the amino acid sequence of an antigenic fragment of a polypeptide having the complete amino acid sequence of SEQ ID NO:Y or the complete amino acid sequence encoded by the cDNA in Clone ID NO:Z.

[0099] The present invention is also directed to proteins which comprise, or alternatively consist of, an amino acid sequence which is at least 80%, 85%, 90%, 95%, 96%, 97%, 98%, 99% or 100%, identical to, for example, any of the amino acid sequences in (a), (b), (c), or (d), above, the amino acid sequence shown in SEQ ID NO:Y, the amino acid sequence encoded by the cDNA contained in Clone ID NO:Z, the amino acid sequence of the polypeptide encoded by the nucleotide sequence in SEQ ID NO:X as defined in columns 8 and 9 of Table 2, the amino acid sequence of the polypeptide encoded by the nucleotide sequence in SEQ ID NO:B as defined in column 6 of Table 1B, the amino acid sequence as defined in column 7 of Table 1A, an amino acid sequence encoded by the nucleotide sequence in SEQ ID NO:X, and an amino acid sequence encoded by the complement of the polynucleotide sequence in SEQ ID NO:X. Fragments of these polypeptides are also provided (e.g., those fragments described herein). Further proteins encoded by polynucleotides which hybridize to the complement of the nucleic acid molecules encoding these amino acid sequences under stringent hybridization conditions or alternatively, under lower stringency conditions, are also encompassed by the invention, as are the polynucleotides encoding these proteins.

[0100] By a nucleic acid having a nucleotide sequence at least, for example, 95% “identical” to a reference nucleotide sequence of the present invention, it is intended that the nucleotide sequence of the nucleic acid is identical to the reference sequence except that the nucleotide sequence may include up to five point mutations per each 100 nucleotides of the reference nucleotide sequence encoding the polypeptide. In other words, to obtain a nucleic acid having a nucleotide sequence at least 95% identical to a reference nucleotide sequence, up to 5% of the nucleotides in the reference sequence may be deleted or substituted with another nucleotide, or a number of nucleotides up to 5% of the total nucleotides in the reference sequence may be inserted into the reference sequence. The query sequence may be an entire sequence referred to in Table 1A or 2 as the ORF (open reading frame), or any fragment specified as described herein.

[0101] As a practical matter, whether any particular nucleic acid molecule or polypeptide is at least 80%, 85%, 90%, 95%, 96%, 97%, 98% or 99% identical to a nucleotide sequence of the present invention can be determined conventionally using known computer programs. A preferred method for determining the best overall match between a query sequence (a sequence of the present invention) and a subject sequence, also referred to as a global sequence alignment, can be determined using the FASTDB computer program based on the algorithm of Brutlag et al. (Comp. App. Biosci. 6:237-245 (1990)). In a sequence alignment the query and subject sequences are both DNA sequences. An RNA sequence can be compared by converting U's to T's. The result of said global sequence alignment is expressed as percent identity. Preferred parameters used in a FASTDB alignment of DNA sequences to calculate percent identity are: Matrix=Unitary, k-tuple=4, Mismatch Penalty=1, Joining Penalty=30, Randomization Group Length=0, Cutoff Score=1, Gap Penalty=5, Gap Size Penalty 0.05, Window Size=500 or the length of the subject nucleotide sequence, whichever is shorter.

[0102] If the subject sequence is shorter than the query sequence because of 5′ or 3′ deletions, not because of internal deletions, a manual correction must be made to the results. This is because the FASTDB program does not account for 5′ and 3′ truncations of the subject sequence when calculating percent identity. For subject sequences truncated at the 5′ or 3′ ends, relative to the query sequence, the percent identity is corrected by calculating the number of bases of the query sequence that are 5′ and 3′ of the subject sequence, which are not matched/aligned, as a percent of the total bases of the query sequence. Whether a nucleotide is matched/aligned is determined by results of the FASTDB sequence alignment. This percentage is then subtracted from the percent identity, calculated by the above FASTDB program using the specified parameters, to arrive at a final percent identity score. This corrected score is what is used for the purposes of the present invention. Only bases outside the 5′ and 3′ bases of the subject sequence, as displayed by the FASTDB alignment, which are not matched/aligned with the query sequence, are calculated for the purposes of manually adjusting the percent identity score.

[0103] For example, a 90 base subject sequence is aligned to a 100 base query sequence to determine percent identity. The deletions occur at the 5′ end of the subject sequence and therefore, the FASTDB alignment does not show a matched/alignment of the first 10 bases at 5′ end. The 10 unpaired bases represent 10% of the sequence (number of bases at the 5′ and 3′ ends not matched/total number of bases in the query sequence) so 10% is subtracted from the percent identity score calculated by the FASTDB program. If the remaining 90 bases were perfectly matched the final percent identity would be 90%. In another example, a 90 base subject sequence is compared with a 100 base query sequence. This time the deletions are internal deletions so that there are no bases on the 5′ or 3′ of the subject sequence which are not matched/aligned with the query. In this case the percent identity calculated by FASTDB is not manually corrected. Once again, only bases 5′ and 3′ of the subject sequence which are not matched/aligned with the query sequence are manually corrected for. No other manual corrections are to be made for the purposes of the present invention.

[0104] By a polypeptide having an amino acid sequence at least, for example, 95% “identical” to a query amino acid sequence of the present invention, it is intended that the amino acid sequence of the subject polypeptide is identical to the query sequence except that the subject polypeptide sequence may include up to five amino acid alterations per each 100 amino acids of the query amino acid sequence. In other words, to obtain a polypeptide having an amino acid sequence at least 95% identical to a query amino acid sequence, up to 5% of the amino acid residues in the subject sequence may be inserted, deleted, (indels) or substituted with another amino acid. These alterations of the reference sequence may occur at the amino or carboxy terminal positions of the reference amino acid sequence or anywhere between those terminal positions, interspersed either individually among residues in the reference sequence or in one or more contiguous groups within the reference sequence.

[0105] As a practical matter, whether any particular polypeptide is at least 80%, 85%, 90%, 95%, 96%, 97%, 98% or 99% identical to, for instance, the amino acid sequence of a polypeptide referred to in Table 1A (e.g., the amino acid sequence identified in column 6) or Table 2 (e.g., the amino acid sequence of the polypeptide encoded by the polynucleotide sequence defined in columns 8 and 9 of Table 2) or a fragment thereof, the amino acid sequence of the polypeptide encoded by the polynucleotide sequence in SEQ ID NO:B as defined in column 6 of Table 1B or a fragment thereof, the amino acid sequence of the polypeptide encoded by the nucleotide sequence in SEQ ID NO:X or a fragment thereof, or the amino acid sequence of the polypeptide encoded by cDNA contained in Clone ID NO:Z, or a fragment thereof, can be determined conventionally using known computer programs. A preferred method for determining the best overall match between a query sequence (a sequence of the present invention) and a subject sequence, also referred to as a global sequence alignment, can be determined using the FASTDB computer program based on the algorithm of Brutlag et al. (Comp. App. Biosci.6:237-245 (1990)). In a sequence alignment the query and subject sequences are either both nucleotide sequences or both amino acid sequences. The result of said global sequence alignment is expressed as percent identity. Preferred parameters used in a FASTDB amino acid alignment are: Matrix=PAM 0, k-tuple=2, Mismatch Penalty=1, Joining Penalty=20, Randomization Group Length=0, Cutoff Score=1, Window Size=sequence length, Gap Penalty=5, Gap Size Penalty=0.05, Window Size=500 or the length of the subject amino acid sequence, whichever is shorter.

[0106] If the subject sequence is shorter than the query sequence due to N- or C-terminal deletions, not because of internal deletions, a manual correction must be made to the results. This is because the FASTDB program does not account for N- and C-terminal truncations of the subject sequence when calculating global percent identity. For subject sequences truncated at the N- and C-termini, relative to the query sequence, the percent identity is corrected by calculating the number of residues of the query sequence that are N- and C-terminal of the subject sequence, which are not matched/aligned. with a corresponding subject residue, as a percent of the total bases of the query sequence. Whether a residue is matched/aligned is determined by results of the FASTDB sequence alignment. This percentage is then subtracted from the percent identity, calculated by the above FASTDB program using the specified parameters, to arrive at a final percent identity score. This final percent identity score is what is used for the purposes of the present invention. Only residues to the N- and C-termini of the subject sequence, which are not matched/aligned with the query sequence, are considered for the purposes of manually adjusting the percent identity score. That is, only query residue positions outside the farthest N- and C-terminal residues of the subject sequence.

[0107] For example, a 90 amino acid residue subject sequence is aligned with a 100 residue query sequence to determine percent identity. The deletion occurs at the N-terminus of the subject sequence and therefore, the FASTDB alignment does not show a matching/alignment of the first 10 residues at the N-terminus. The 10 unpaired residues represent 10% of the sequence (number of residues at the N- and C-termini not matched/total number of residues in the query sequence) so 10% is subtracted from the percent identity score calculated by the FASTDB program. If the remaining 90 residues were perfectly matched the final percent identity would be 90%. In another example, a 90 residue subject sequence is compared with a 100 residue query sequence. This time the deletions are internal deletions so there are no residues at the N- or C-termini of the subject sequence which are not matched/aligned with the query. In this case the percent identity calculated by FASTDB is not manually corrected. Once again, only residue positions outside the N- and C-terminal ends of the subject sequence, as displayed in the FASTDB alignment, which are not matched/aligned with the query sequnce are manually corrected for. No other manual corrections are to made for the purposes of the present invention.

[0108] The polynucleotide variants of the invention may contain alterations in the coding regions, non-coding regions, or both. Especially preferred are polynucleotide variants containing alterations which produce silent substitutions, additions, or deletions, but do not alter the properties or activities of the encoded polypeptide. Nucleotide variants produced by silent substitutions due to the degeneracy of the genetic code are preferred. Moreover, polypeptide variants in which less than 50, less than 40, less than 30, less than 20, less than 10, or 5-50, 5-25, 5-10, 1-5, or 1-2 amino acids are substituted, deleted, or added in any combination are also preferred. Polynucleotide variants can be produced for a variety of reasons, e.g., to optimize codon expression for a particular host (change codons in the human mRNA to those preferred by a bacterial host such as E. coli).

[0109] Naturally occurring variants are called “allelic variants,” and refer to one of several alternate forms of a gene occupying a given locus on a chromosome of an organism. (Genes II, Lewin, B., ed., John Wiley & Sons, New York (1985)). These allelic variants can vary at either the polynucleotide and/or polypeptide level and are included in the present invention. Alternatively, non-naturally occurring variants may be produced by mutagenesis techniques or by direct synthesis.

[0110] Using known methods of protein engineering and recombinant DNA technology, variants may be generated to improve or alter the characteristics of the polypeptides of the present invention. For instance, one or more amino acids can be deleted from the N-terminus or C-terminus of the polypeptide of the present invention without substantial loss of biological function. As an example, Ron et al. (J. Biol. Chem. 268: 2984-2988 (1993)) reported variant KGF proteins having heparin binding activity even after deleting 3, 8, or 27 amino-terminal amino acid residues. Similarly, Interferon gamma exhibited up to ten times higher activity after deleting 8-10 amino acid residues from the carboxy terminus of this protein. (Dobeli et al., J. Biotechnology 7:199-216 (1988).)

[0111] Moreover, ample evidence demonstrates that variants often retain a biological activity similar to that of the naturally occurring protein. For example, Gayle and coworkers (J. Biol. Chem. 268:22105-22111 (1993)) conducted extensive mutational analysis of human cytokine IL-1a. They used random mutagenesis to generate over 3,500 individual IL-1a mutants that averaged 2.5 amino acid changes per variant over the entire length of the molecule. Multiple mutations were examined at every possible amino acid position. The investigators found that “[m]ost of the molecule could be altered with little effect on either [binding or biological activity].” In fact, only 23 unique amino acid sequences, out of more than 3,500 nucleotide sequences examined, produced a protein that significantly differed in activity from wild-type.

[0112] Furthermore, even if deleting one or more amino acids from the N-terminus or C-terminus of a polypeptide results in modification or loss of one or more biological functions, other biological activities may still be retained. For example, the ability of a deletion variant to induce and/or to bind antibodies which recognize the secreted form will likely be retained when less than the majority of the residues of the secreted form are removed from the N-terminus or C-terminus. Whether a particular polypeptide lacking N- or C-terminal residues of a protein retains such immunogenic activities can readily be determined by routine methods described herein and otherwise known in the art.

[0113] Thus, the invention further includes polypeptide variants which show a functional activity (e.g., biological activity) of the polypeptides of the invention. Such variants include deletions, insertions, inversions, repeats, and substitutions selected according to general rules known in the art so as have little effect on activity.

[0114] The present application is directed to nucleic acid molecules at least 80%, 85%, 90%, 95%, 96%, 97%, 98%, 99% or 100% identical to the nucleic acid sequences disclosed herein, (e.g., encoding a polypeptide having the amino acid sequence of an N and/or C terminal deletion), irrespective of whether they encode a polypeptide having functional activity. This is because even where a particular nucleic acid molecule does not encode a polypeptide having functional activity, one of skill in the art would still know how to use the nucleic acid molecule, for instance, as a hybridization probe or a polymerase chain reaction (PCR) primer. Uses of the nucleic acid molecules of the present invention that do not encode a polypeptide having functional activity include, inter alia, (1) isolating a gene or allelic or splice variants thereof in a cDNA library; (2) in situ hybridization (e.g., “FISH”) to metaphase chromosomal spreads to provide precise chromosomal location of the gene, as described in Verma et al., Human Chromosomes: A Manual of Basic Techniques, Pergamon Press, New York (1988); (3) Northern Blot analysis for detecting mRNA expression in specific tissues (e.g., normal or diseased tissues); and (4) in situ hybridization (e.g., histochemistry) for detecting mRNA expression in specific tissues (e.g., normal or diseased tissues).

[0115] Preferred, however, are nucleic acid molecules having sequences at least 80%, 85%, 90%, 95%, 96%, 97%, 98%, 99% or 100% identical to the nucleic acid sequences disclosed herein, which do, in fact, encode a polypeptide having functional activity. By a polypeptide having “functional activity” is meant, a polypeptide capable of displaying one or more known functional activities associated with a full-length (complete) protein of the invention. Such functional activities include, but are not limited to, biological activity, antigenicity [ability to bind (or compete with a polypeptide of the invention for binding) to an anti-polypeptide of the invention antibody], immunogenicity (ability to generate antibody which binds to a specific polypeptide of the invention), ability to form multimers with polypeptides of the invention, and ability to bind to a receptor or ligand for a polypeptide of the invention.

[0116] The functional activity of the polypeptides, and fragments, variants and derivatives of the invention, can be assayed by various methods.

[0117] For example, in one embodiment where one is assaying for the ability to bind or compete with a full-length polypeptide of the present invention for binding to an anti-polypetide antibody, various immunoassays known in the art can be used, including but not limited to, competitive and non-competitive assay systems using techniques such as radioimmunoassays, ELISA (enzyme linked immunosorbent assay), “sandwich” immunoassays, immunoradiometric assays, gel diffusion precipitation reactions, immunodiffusion assays, in situ immunoassays (using colloidal gold, enzyme or radioisotope labels, for example), western blots, precipitation reactions, agglutination assays (e.g., gel agglutination assays, hemagglutination assays), complement fixation assays, immunofluorescence assays, protein A assays, and immunoelectrophoresis assays, etc. In one embodiment, antibody binding is detected by detecting a label on the primary antibody. In another embodiment, the primary antibody is detected by detecting binding of a secondary antibody or reagent to the primary antibody. In a further embodiment, the secondary antibody is labeled. Many means are known in the art for detecting binding in an immunoassay and are within the scope of the present invention.

[0118] In another embodiment, where a ligand is identified, or the ability of a polypeptide fragment, variant or derivative of the invention to multimerize is being evaluated, binding can be assayed, e.g., by means well-known in the art, such as, for example, reducing and non-reducing gel chromatography, protein affinity chromatography, and affinity blotting. See generally, Phizicky et al., Microbiol. Rev. 59:94-123 (1995). In another embodiment, the ability of physiological correlates of a polypeptide of the present invention to bind to a substrate(s) of the polypeptide of the invention can be routinely assayed using techniques known in the art.

[0119] In addition, assays described herein (see Examples) and otherwise known in the art may routinely be applied to measure the ability of polypeptides of the present invention and fragments, variants and derivatives thereof to elicit polypeptide related biological activity (either in vitro or in vivo). Other methods will be known to the skilled artisan and are within the scope of the invention.

[0120] Of course, due to the degeneracy of the genetic code, one of ordinary skill in the art will immediately recognize that a large number of the nucleic acid molecules having a sequence at least 80%, 85%, 90%, 95%, 96%, 97%, 98%, 99%, or 100% identical to, for example, the nucleic acid sequence of the cDNA contained in Clone ID NO:Z, the nucleic acid sequence referred to in Table 1A (SEQ ID NO:X), the nucleic acid sequence disclosed in Table 2 (e.g,. the nucleic acid sequence delineated in columns 8 and 9) or fragments thereof, will encode polypeptides “having functional activity.” In fact, since degenerate variants of any of these nucleotide sequences all encode the same polypeptide, in many instances, this will be clear to the skilled artisan even without performing the above described comparison assay. It will be further recognized in the art that, for such nucleic acid molecules that are not degenerate variants, a reasonable number will also encode a polypeptide having functional activity. This is because the skilled artisan is fully aware of amino acid substitutions that are either less likely or not likely to significantly effect protein function (e.g., replacing one aliphatic amino acid with a second aliphatic amino acid), as further described below.

[0121] For example, guidance concerning how to make phenotypically silent amino acid substitutions is provided in Bowie et al., “Deciphering the Message in Protein Sequences: Tolerance to Amino Acid Substitutions,” Science 247:1306-1310 (1990), wherein the authors indicate that there are two main strategies for studying the tolerance of an amino acid sequence to change.

[0122] The first strategy exploits the tolerance of amino acid substitutions by natural selection during the process of evolution. By comparing amino acid sequences in different species, conserved amino acids can be identified. These conserved amino acids are likely important for protein function. In contrast, the amino acid positions where substitutions have been tolerated by natural selection indicates that these positions are not critical for protein function. Thus, positions tolerating amino acid substitution could be modified while still maintaining biological activity of the protein.

[0123] The second strategy uses genetic engineering to introduce amino acid changes at specific positions of a cloned gene to identify regions critical for protein function. For example, site directed mutagenesis or alanine-scanning mutagenesis (introduction of single alanine mutations at every residue in the molecule) can be used. See Cunningham and Wells, Science 244:1081-1085 (1989). The resulting mutant molecules can then be tested for biological activity.

[0124] As the authors state, these two strategies have revealed that proteins are surprisingly tolerant of amino acid substitutions. The authors further indicate which amino acid changes are likely to be permissive at certain amino acid positions in the protein. For example, most buried (within the tertiary structure of the protein) amino acid residues require nonpolar side chains, whereas few features of surface side chains are generally conserved. Moreover, tolerated conservative amino acid substitutions involve replacement of the aliphatic or hydrophobic amino acids Ala, Val, Leu and Ile; replacement of the hydroxyl residues Ser and Thr; replacement of the acidic residues Asp and Glu; replacement of the amide residues Asn and Gln, replacement of the basic residues Lys, Arg, and His; replacement of the aromatic residues Phe, Tyr, and Trp, and replacement of the small-sized amino acids Ala, Ser, Thr, Met, and Gly. Besides conservative amino acid substitution, variants of the present invention include (i) substitutions with one or more of the non-conserved amino acid residues, where the substituted amino acid residues may or may not be one encoded by the genetic code, or (ii) substitutions with one or more of the amino acid residues having a substituent group, or (iii) fusion of the mature polypeptide with another compound, such as a compound to increase the stability and/or solubility of the polypeptide (for example, polyethylene glycol), (iv) fusion of the polypeptide with additional amino acids, such as, for example, an IgG Fc fusion region peptide, serum albumin (preferably human serum albumin) or a fragment thereof, or leader or secretory sequence, or a sequence facilitating purification, or (v) fusion of the polypeptide with another compound, such as albumin (including but not limited to recombinant albumin (see, e.g., U.S. Pat. No. 5,876,969, issued Mar. 2, 1999, EP Patent 0 413 622, and U.S. Pat. No. 5,766,883, issued Jun. 16, 1998, herein incorporated by reference in their entirety)). Such variant polypeptides are deemed to be within the scope of those skilled in the art from the teachings herein.

[0125] For example, polypeptide variants containing amino acid substitutions of charged amino acids with other charged or neutral amino acids may produce proteins with improved characteristics, such as less aggregation. Aggregation of pharmaceutical formulations both reduces activity and increases clearance due to the aggregate's immunogenic activity. See Pinckard et al., Clin. Exp. Immunol. 2:331-340 (1967); Robbins et al., Diabetes 36: 838-845 (1987); Cleland et al., Crit. Rev. Therapeutic Drug Carrier Systems 10:307-377 (1993).

[0126] A further embodiment of the invention relates to polypeptides which comprise the amino acid sequence of a polypeptide having an amino acid sequence which contains at least one amino acid substitution, but not more than 50 amino acid substitutions, even more preferably, not more than 40 amino acid substitutions, still more preferably, not more than 30 amino acid substitutions, and still even more preferably, not more than 20 amino acid substitutions from a polypeptide sequence disclosed herein. Of course it is highly preferable for a polypeptide to have an amino acid sequence which comprises the amino acid sequence of a polypeptide of SEQ ID NO:Y, an amino acid sequence encoded by SEQ ID NO:X, an amino acid sequence encoded by the portion of SEQ ID NO:X as defined in columnns 8 and 9 of Table 2, an amino acid sequence encoded by the complement of SEQ ID NO:X, and/or an amino acid sequence encoded by cDNA contained in Clone ID NO:Z which contains, in order of ever-increasing preference, at least one, but not more than 10, 9, 8, 7, 6, 5, 4, 3, 2 or 1 amino acid substitutions.

[0127] In specific embodiments, the polypeptides of the invention comprise, or alternatively, consist of, fragments or variants of a reference amino acid sequence selected from: (a) the amino acid sequence of SEQ ID NO:Y or fragments thereof (e.g., the mature form and/or other fragments described herein); (b) the amino acid sequence encoded by SEQ ID NO:X or fragments thereof; (c) the amino acid sequence encoded by the complement of SEQ ID NO:X or fragments thereof, (d) the amino acid sequence encoded by the portion of SEQ ID NO:X as defined in columns 8 and 9 of Table 2 or fragments thereof; and (e) the amino acid sequence encoded by cDNA contained in Clone ID NO:Z or fragments thereof; wherein the fragments or variants have 1-5, 5-10, 5-25, 5-50, 10-50 or 50-150, amino acid residue additions, substitutions, and/or deletions when compared to the reference amino acid sequence. In preferred embodiments, the amino acid substitutions are conservative. Polynucleotides encoding these polypeptides are also encompassed by the invention.

[0128] Polynucleotide and Polypeptide Fragments

[0129] The present invention is also directed to polynucleotide fragments of the polynucleotides (nucleic acids) of the invention. In the present invention, a “polynucleotide fragment” refers to a polynucleotide having a nucleic acid sequence which, for example: is a portion of the cDNA contained in Clone ID NO:Z or the complementary strand thereto; is a portion of the polynucleotide sequence encoding the polypeptide encoded by the cDNA contained in Clone ID NO:Z or the complementary strand thereto; is a portion of a polynucleotide sequence encoding the amino acid sequence encoded by the region of SEQ ID NO:X as defined in columns 8 and 9 of Table 2 or the complementary strand thereto; is a portion of the polynucleotide sequence of SEQ ID NO:X as defined in columns 8 and 9 of Table 2 or the complementary strand thereto; is a portion of the polynucleotide sequence in SEQ ID NO:X or the complementary strand thereto; is a polynucleotide sequence encoding a portion of the polypeptide of SEQ ID NO:Y; is a polynucleotide sequence encoding a portion of a polypeptide encoded by SEQ ID NO:X; is a polynucleotide sequence encoding a portion of a polypeptide encoded by the complement of the polynucleotide sequence in SEQ ID NO:X; is a portion of a polynucleotide sequence encoding the amino acid sequence encoded by the region of SEQ ID NO:B as defined in column 6 of Table 1B or the complementary strand thereto; or is a portion of the polynucleotide sequence of SEQ ID NO:B as defined in column 6 of Table 1B or the complementary strand thereto.

[0130] The polynucleotide fragments of the invention are preferably at least about 15 nt, and more preferably at least about 20 nt, still more preferably at least about 30 nt, and even more preferably, at least about 40 nt, at least about 50 nt, at least about 75 nt, or at least about 150 nt in length. A fragment “at least 20 nt in length,” for example, is intended to include 20 or more contiguous bases from the cDNA sequence contained in Clone ID NO:Z, or the nucleotide sequence shown in SEQ ID NO:X or the complementary stand thereto. In this context “about” includes the particularly recited value or a value larger or smaller by several (5, 4, 3, 2, or 1) nucleotides, at either terminus or at both termini. These nucleotide fragments have uses that include, but are not limited to, as diagnostic probes and primers as discussed herein. Of course, larger fragments (e.g., at least 160, 170, 180, 190, 200, 250, 500, 600, 1000, or 2000 nucleotides in length) are also encompassed by the invention.

[0131] Moreover, representative examples of polynucleotide fragments of the invention comprise, or alternatively consist of, a sequence from about nucleotide number 1-50, 51-100, 101-150, 151-200, 201-250, 251-300, 301-350, 351-400, 401-450, 451-500, 501-550, 551-600, 601-650, 651-700, 701-750, 751-800, 801-850, 851-900, 901-950, 951-1000, 1001-1050, 1051-1100, 1101-1150, 1151-1200, 1201-1250, 1251-1300, 1301-1350, 1351-1400, 1401-1450, 1451-1500, 1501-1550, 1551-1600, 1601-1650, 1651-1700, 1701-1750, 1751-1800, 1801-1850, 1851-1900, 1901-1950, 1951-2000, 2001-2050, 2051-2100, 2101-2150, 2151-2200, 2201-2250, 2251-2300, 2301-2350, 2351-2400, 2401-2450, 2451-2500, 2501-2550, 2551-2600, 2601-2650, 2651-2700, 2701-2750, 2751-2800, 2801-2850, 2851-2900, 2901-2950, 2951-3000, 3001-3050, 3051-3100, 3101-3150, 3151-3200, 3201-3250, 3251-3300, 3301-3350, 3351-3400, 3401-3450, 3451-3500, 3501-3550, 3551-3600, 3601-3650, 3651-3700, 3701-3750, 3751-3800, 3801-3850, 3851-3900, 3901-3950, 3951-4000, 4001-4050, 4051-4100, 4101-4150, 4151-4200, 4201-4250, 4251-4300, 4301-4350, 4351-4400, 4401-4450, 4451-4500, 4501-4550, 4551-4600, 4601-4650, 4651-4700, 4701-4750, 4751-4800, 4801-4850, 4851-4900, 4901-4950, 4951-5000, 5001-5050, 5051-5100, 5101-5150, 5151-5200, 5201-5250, 5251-5300, 5301-5350, 5351-5400, 5401-5450, 5451-5500, 5501-5550, 5551-5600, 5601-5650, 5651-5700, 5701-5750, 5751-5800, 5801-5850, 5851-5900, 5901-5950, 5951-6000, 6001-6050, 6051-6100, 6101-6150, 6151-6200, 6201-6250, 6251-6300, 6301-6350, 6351-6400, 6401-6450, 6451-6500, 6501-6550, 6551-6600, 6601-6650, 6651-6700, 6701-6750, 6751-6800, 6801-6850, 6851-6900, 6901-6950, 6951-7000, 7001-7050, 7051-7100, 7101-7150, 7151-7200, 7201-7250, 7251-7300 or 7301 to the end of SEQ ID NO:X, or the complementary strand thereto. In this context “about” includes the particularly recited range or a range larger or smaller by several (5, 4, 3, 2, or 1) nucleotides, at either terminus or at both termini. Preferably, these fragments encode a polypeptide which has a functional activity (e.g., biological activity). More preferably, these polynucleotides can be used as probes or primers as discussed herein. Polynucleotides which hybridize to one or more of these polynucleotides under stringent hybridization conditions or alternatively, under lower stringency conditions are also encompassed by the invention, as are polypeptides encoded by these polynucleotides.

[0132] Further representative examples of polynucleotide fragments of the invention comprise, or alternatively consist of, a sequence from about nucleotide number 1-50, 51-100, 101-150, 151-200, 201-250, 251-300, 301-350, 351-400, 401-450, 451-500, 501-550, 551-600, 601-650, 651-700, 701-750, 751-800, 801-850, 851-900, 901-950, 951-1000, 1001-1050, 1051-1100, 1101-1150, 1151-1200, 1201-1250, 1251-1300, 1301-1350, 1351-1400, 1401-1450, 1451-1500, 1501-1550, 1551-1600, 1601-1650, 1651-1700, 1701-1750, 1751-1800, 1801-1850, 1851-1900, 1901-1950, 1951-2000, 2001-2050, 2051-2100, 2101-2150, 2151-2200, 2201-2250, 2251-2300, 2301-2350, 2351-2400, 2401-2450, 2451-2500, 2501-2550, 2551-2600, 2601-2650, 2651-2700, 2701-2750, 2751-2800, 2801-2850, 2851-2900, 2901-2950, 2951-3000, 3001-3050, 3051-3100, 3101-3150, 3151-3200, 3201-3250, 3251-3300, 3301-3350, 3351-3400, 3401-3450, 3451-3500, 3501-3550, 3551-3600, 3601-3650, 3651-3700, 3701-3750, 3751-3800, 3801-3850, 3851-3900, 3901-3950, 3951-4000, 4001-4050, 4051-4100, 4101-4150, 4151-4200, 4201-4250, 4251-4300, 4301-4350, 4351-4400, 4401-4450, 4451-4500, 4501-4550, 4551-4600, 4601-4650, 4651-4700, 4701-4750, 4751-4800, 4801-4850, 4851-4900, 4901-4950, 4951-5000, 5001-5050, 5051-5100, 5101-5150, 5151-5200, 5201-5250, 5251-5300, 5301-5350, 5351-5400, 5401-5450, 5451-5500, 5501-5550, 5551-5600, 5601-5650, 5651-5700, 5701-5750, 5751-5800, 5801-5850, 5851-5900, 5901-5950, 5951-6000, 6001-6050, 6051-6100, 6101-6150, 6151-6200, 6201-6250, 6251-6300, 6301-6350, 6351-6400, 6401-6450, 6451-6500, 6501-6550, 6551-6600, 6601-6650, 6651-6700, 6701-6750, 6751-6800, 6801-6850, 6851-6900, 6901-6950, 6951-7000, 7001-7050, 7051-7100, 7101-7150, 7151-7200, 7201-7250, 7251-7300 or 7301 to the end of the cDNA sequence contained in Clone ID NO:Z, or the complementary strand thereto. In this context “about” includes the particularly recited range or a range larger or smaller by several (5, 4, 3, 2, or 1) nucleotides, at either terminus or at both termini. Preferably, these fragments encode a polypeptide which has a functional activity (e.g., biological activity). More preferably, these polynucleotides can be used as probes or primers as discussed herein. Polynucleotides which hybridize to one or more of these polynucleotides under stringent hybridization conditions or alternatively, under lower stringency conditions are also encompassed by the invention, as are polypeptides encoded by these polynucleotides.

[0133] Moreover, representative examples of polynucleotide fragments of the invention comprise, or alternatively consist of, a nucleic acid sequence comprising one, two, three, four, five, six, seven, eight, nine, ten, or more of the above described polynucleotide fragments of the invention in combination with a polynucleotide sequence delineated in Table 1B column 6. Additional, representative examples of polynucleotide fragments of the invention comprise, or alternatively consist of, a nucleic acid sequence comprising one, two, three, four, five, six, seven, eight, nine, ten, or more of the above described polynucleotide fragments of the invention in combination with a polynucleotide sequence that is the complementary strand of a sequence delineated in column 6 of Table 1B. In further embodiments, the above-described polynucleotide fragments of the invention comprise, or alternatively consist of, sequences delineated in Table 1B, column 6, and have a nucleic acid sequence which is different from that of the BAC fragment having the sequence disclosed in SEQ ID NO:B (see Table 1B, column 5). In additional embodiments, the above-described polynucleotide fragments of the invention comprise, or alternatively consist of, sequences delineated in Table 1B, column 6, and have a nucleic acid sequence which is different from that published for the BAC clone identified as BAC ID NO:A (see Table 1B, column 4). In additional embodiments, the above-described polynucleotides of the invention comprise, or alternatively consist of, sequences delineated Table 1B, column 6, and have a nucleic acid sequence which is different from that contained in the BAC clone identified as BAC ID NO:A (see Table 1B, column 4). Polypeptides encoded by these polynucleotides, other polynucleotides that encode these polypeptides, and antibodies that bind these polypeptides are also encompassed by the invention. Additionally, fragments and variants of the above-described polynucleotides and polypeptides are also encompassed by the invention.

[0134] In additional specific embodiments, polynucleotides of the invention comprise, or alternatively consist of, one, two, three, four, five, six, seven, eight, nine, ten, or more fragments of the sequences delineated in column 6 of Table 1B, and the polynucleotide sequence of SEQ ID NO:X (e.g., as defined in Table 1B, column 2) or fragments or variants thereof. Polypeptides encoded by these polynucleotides, other polynucleotides that encode these polypeptides, and antibodies that bind these polypeptides are also encompassed by the invention.

[0135] In additional specific embodiments, polynucleotides of the invention comprise, or alternatively consist of, one, two, three, four, five, six, seven, eight, nine, ten, or more fragments of the sequences delineated in column 6 of Table 1B which correspond to the same Clone ID NO:Z (see Table 1B, column 1), and the polynucleotide sequence of SEQ ID NO:X (e.g., as defined in Table 1A or 1B) or fragments or variants thereof. Polypeptides encoded by these polynucleotides, other polynucleotides that encode these polypeptides, and antibodies that bind these polypeptides are also encompassed by the invention.

[0136] In further specific embodiments, polynucleotides of the invention comprise, or alternatively consist of, one, two, three, four, five, six, seven, eight, nine, ten, or more fragments of the sequences delineated in the same row of column 6 of Table 1B, and the polynucleotide sequence of SEQ ID NO:X (e.g., as defined in Table 1A or 1B) or fragments or variants thereof. Polypeptides encoded by these polynucleotides, other polynucleotides that encode these polypeptides, and antibodies that bind these polypeptides are also encompassed by the invention.

[0137] In additional specific embodiments, polynucleotides of the invention comprise, or alternatively consist of a polynucleotide sequence in which the 3′ 10 polynucleotides of one of the sequences delineated in column 6 of Table 1B and the 5′ 10 polynucleotides of the sequence of SEQ ID NO:X are directly contiguous. Nucleic acids which hybridize to the complement of these 20 contiguous polynucleotides under stringent hybridization conditions or alternatively, under lower stringency conditions, are also encompassed by the invention. Polypeptides encoded by these polynucleotides and/or nucleic acids, other polynucleotides and/or nucleic acids that encode these polypeptides, and antibodies that bind these polypeptides are also encompassed by the invention. Additionally, fragments and variants of the above-described polynucleotides, nucleic acids, and polypeptides are also encompassed by the invention.

[0138] In additional specific embodiments, polynucleotides of the invention comprise, or alternatively consist of a polynucleotide sequence in which the 3′ 10 polynucleotides of one of the sequences delineated in column 6 of Table 1B and the 5′ 10 polynucleotides of a fragment or variant of the sequence of SEQ ID NO:X (e.g., as described herein) are directly contiguous Nucleic acids which hybridize to the complement of these 20 contiguous polynucleotides under stringent hybridization conditions or alternatively, under lower stringency conditions, are also encompassed by the invention. Polypeptides encoded by these polynucleotides and/or nucleic acids, other polynucleotides and/or nucleic acids encoding these polypeptides, and antibodies that bind these polypeptides are also encompassed by the invention. Additionally, fragments and variants of the above-described polynucleotides, nucleic acids, and polypeptides are also encompassed by the invention.

[0139] In further specific embodiments, polynucleotides of the invention comprise, or alternatively consist of a polynucleotide sequence in which the 3′ 10 polynucleotides of a fragment or variant of the sequence of SEQ ID NO:X and the 5′ 10 polynucleotides of the sequence of one of the sequences delineated in column 6 of Table 1B are directly contiguous. Nucleic acids which hybridize to the complement of these 20 contiguous polynucleotides under stringent hybridization conditions or alternatively, under lower stringency conditions, are also encompassed by the invention. Polypeptides encoded by these polynucleotides and/or nucleic acids, other polynucleotides and/or nucleic acids encoding these polypeptides, and antibodies that bind these polypeptides are also encompassed by the invention. Additionally, fragments and variants of the above-described polynucleotides, nucleic acids, and polypeptides are also encompassed by the invention.

[0140] In specific embodiments, polynucleotides of the invention comprise, or alternatively consist of a polynucleotide sequence in which the 3′ 10 polynucleotides of one of the sequences delineated in column 6 of Table 1B and the 5′ 10 polynucleotides of another sequence in column 6 are directly contiguous. In preferred embodiments, the 3′ 10 polynucleotides of one of the sequences delineated in column 6 of Table 1B is directly contiguous with the 5′ 10 polynucleotides of the next sequential exon delineated in Table 1B, column 6. Nucleic acids which hybridize to the complement of these 20 contiguous polynucleotides under stringent hybridization conditions or alternatively, under lower stringency conditions, are also encompassed by the invention. Polypeptides encoded by these polynucleotides and/or nucleic acids, other polynucleotides and/or nucleic acids encoding these polypeptides, and antibodies that bind these polypeptides are also encompassed by the invention. Additionally, fragments and variants of the above-described polynucleotides, nucleic acids, and polypeptides are also encompassed by the invention.

[0141] In the present invention, a “polypeptide fragment” refers to an amino acid sequence which is a portion of that contained in SEQ ID NO:Y, a portion of an amino acid sequence encoded by the portion of SEQ ID NO:X as defined in columnns 8 and 9 of Table 2, a portion of an amino acid sequence encoded by the polynucleotide sequence of SEQ ID NO:X, a portion of an amino acid sequence encoded by the complement of the polynucleotide sequence in SEQ ID NO:X, and/or a portion of an amino acid sequence encoded by the cDNA contained in Clone ID NO:Z. Protein (polypeptide) fragments may be “free-standing,” or comprised within a larger polypeptide of which the fragment forms a part or region, most preferably as a single continuous region. Representative examples of polypeptide fragments of the invention, include, for example, fragments comprising, or alternatively consisting of, from about amino acid number 1-20, 21-40, 41-60, 61-80, 81-100, 101-120, 121-140, 141-160, 161-180, 181-200, 201-220, 221-240, 241-260, 261-280, 281-300, 301-320, 321-340, 341-360, 361-380, 381-400, 401-420, 421-440, 441-460, 461-480, 481-500, 501-520, 521-540, 541-560, 561-580, 581-600, 601-620, 621-640, 641-660, 661-680, 681-700, 701-720, 721-740, 741-760, 761-780, 781-800, 801-820, 821-840, 841-860, 861-880, 881-900, 901-920, 921-940, 941-960, 961-980, 981-1000, 1001-1020, 1021-1040, 1041-1060, 1061-1080, 1081-1100, 1101-1120, 1121-1140, 1141-1160, 1161-1180, 1181-1200, 1201-1220, 1221-1240, 1241-1260, 1261-1280, 1281-1300, 1301-1320, 1321-1340, 1341-1360, 1361-1380, 1381-1400, 1401-1420, 1421-1440, or 1441 to the end of the coding region of cDNA and SEQ ID NO: Y. In a preferred embodiment, polypeptide fragments of the invention include, for example, fragments comprising, or alternatively consisting of, from about amino acid number 1-20, 21-40, 41-60, 61-80, 81-100, 101-120, 121-140, 141-160, 161-180, 181-200, 201-220, 221-240, 241-260, 261-280, 281-300, 301-320, 321-340, 341-360, 361-380, 381-400, 401-420, 421-440, 441-460, 461-480, 481-500, 501-520, 521-540, 541-560, 561-580, 581-600, 601-620, 621-640, 641-660, 661-680, 681-700, 701-720, 721-740, 741-760, 761-780, 781-800, 801-820, 821-840, 841-860, 861-880, 881-900, 901-920, 921-940, 941-960, 961-980, 981-1000, 1001-1020, 1021-1040, 1041-1060, 1061-1080, 1081-1100, 1101-1120, 1121-1140, 1141-1160, 1161-1180, 1181-1200, 1201-1220, 1221-1240, 1241-1260, 1261-1280, 1281-1300, 1301-1320, 1321-1340, 1341-1360, 1361-1380, 1381-1400, 1401-1420, 1421-1440, or 1441 to the end of the coding region of SEQ ID NO:Y. Moreover, polypeptide fragments of the invention may be at least about 10, 15, 20, 25, 30, 35, 40, 45, 50, 55, 60, 65, 70, 75, 80, 85, 90, 100, 110, 120, 130, 140, or 150 amino acids in length. In this context “about” includes the particularly recited ranges or values, or ranges or values larger or smaller by several (5, 4, 3, 2, or 1) amino acids, at either extreme or at both extremes. Polynucleotides encoding these polypeptide fragments are also encompassed by the invention.

[0142] Even if deletion of one or more amino acids from the N-terminus of a protein results in modification of loss of one or more biological functions of the protein, other functional activities (e.g., biological activities, ability to multimerize, ability to bind a ligand) may still be retained. For example, the ability of shortened muteins to induce and/or bind to antibodies which recognize the complete or mature forms of the polypeptides generally will be retained when less than the majority of the residues of the complete or mature polypeptide are removed from the N-terminus. Whether a particular polypeptide lacking N-terminal residues of a complete polypeptide retains such immunologic activities can readily be determined by routine methods described herein and otherwise known in the art. It is not unlikely that a mutein with a large number of deleted N-terminal amino acid residues may retain some biological or immunogenic activities. In fact, peptides composed of as few as six amino acid residues may often evoke an immune response.

[0143] Accordingly, polypeptide fragments include the secreted protein as well as the mature form. Further preferred polypeptide fragments include the secreted protein or the mature form having a continuous series of deleted residues from the amino or the carboxy terminus, or both. For example, any number of amino acids, ranging from 1-60, can be deleted from the amino terminus of either the secreted polypeptide or the mature form. Similarly, any number of amino acids, ranging from 1-30, can be deleted from the carboxy terminus of the secreted protein or mature form. Furthermore, any combination of the above amino and carboxy terminus deletions are preferred. Similarly, polynucleotides encoding these polypeptide fragments are also preferred.

[0144] The present invention further provides polypeptides having one or more residues deleted from the amino terminus of the amino acid sequence of a polypeptide disclosed herein (e.g., a polypeptide of SEQ ID NO:Y, a polypeptide encoded by the polynucleotide sequence contained in SEQ ID NO:X or the complement thereof, a polypeptide encoded by the portion of SEQ ID NO:X as defined in columns 8 and 9 of Table 2, a polypeptide encoded by the portion of SEQ ID NO:B as defined in column 6 of Table 1B, and/or a polypeptide encoded by the cDNA contained in Clone ID NO:Z). In particular, N-terminal deletions may be described by the general formula m-q, where q is a whole integer representing the total number of amino acid residues in a polypeptide of the invention (e.g., the polypeptide disclosed in SEQ ID NO:Y, or the polypeptide encoded by the portion of SEQ ID NO:X as defined in columns 8 and 9 of Table 2), and m is defined as any integer ranging from 2 to q-6. Polynucleotides encoding these polypeptides are also encompassed by the invention.

[0145] The present invention further provides polypeptides having one or more residues from the carboxy terminus of the amino acid sequence of a polypeptide disclosed herein (e.g., a polypeptide of SEQ ID NO:Y, a polypeptide encoded by the polynucleotide sequence contained in SEQ ID NO:X, a polypeptide encoded by the portion of SEQ ID NO:X as defined in columns 8 and 9 of Table 2, and/or a polypeptide encoded by the cDNA contained in Clone ID NO:Z). In particular, C-terminal deletions may be described by the general formula 1-n, where n is any whole integer ranging from 6 to q-1, and where n corresponds to the position of amino acid residue in a polypeptide of the invention. Polynucleotides encoding these polypeptides are also encompassed by the invention.

[0146] In addition, any of the above described N- or C-terminal deletions can be combined to produce a N- and C-terminal deleted polypeptide. The invention also provides polypeptides having one or more amino acids deleted from both the amino and the carboxyl termini, which may be described generally as having residues m-n of a polypeptide encoded by SEQ ID NO:X (e.g., including, but not limited to, the preferred polypeptide disclosed as SEQ ID NO:Y and the polypeptide encoded by the portion of SEQ ID NO:X as defined in columns 8 and 9 of Table 2), the cDNA contained in Clone ID NO:Z, and/or the complement thereof, where n and m are integers as described above. Polynucleotides encoding these polypeptides are also encompassed by the invention.

[0147] Also as mentioned above, even if deletion of one or more amino acids from the C-terminus of a protein results in modification of loss of one or more biological functions of the protein, other functional activities (e.g., biological activities, ability to multimerize, ability to bind a ligand) may still be retained. For example the ability of the shortened mutein to induce and/or bind to antibodies which recognize the complete or mature forms of the polypeptide generally will be retained when less than the majority of the residues of the complete or mature polypeptide are removed from the C-terminus. Whether a particular polypeptide lacking C-terminal residues of a complete polypeptide retains such immunologic activities can readily be determined by routine methods described herein and otherwise known in the art. It is not unlikely that a mutein with a large number of deleted C-terminal amino acid residues may retain some biological or immunogenic activities. In fact, peptides composed of as few as six amino acid residues may often evoke an immune response.

[0148] The present application is also directed to proteins containing polypeptides at least 80%, 85%, 90%, 95%, 96%, 97%, 98% or 99% identical to a polypeptide sequence set forth herein. In preferred embodiments, the application is directed to proteins containing polypeptides at least 80%, 85%, 90%, 95%, 96%, 97%, 98% or 99% identical to polypeptides having the amino acid sequence of the specific N- and C-terminal deletions. Polynucleotides encoding these polypeptides are also encompassed by the invention.

[0149] Any polypeptide sequence encoded by, for example, the polynucleotide sequences set forth as SEQ ID NO:X or the complement thereof, (presented, for example, in Tables 1A and 2), the cDNA contained in Clone ID NO:Z, or the polynucleotide sequence as defined in column 6 of Table 1B, may be analyzed to determine certain preferred regions of the polypeptide. For example, the amino acid sequence of a polypeptide encoded by a polynucleotide sequence of SEQ ID NO:X (e.g., the polypeptide of SEQ ID NO:Y and the polypeptide encoded by the portion of SEQ ID NO:X as defined in columnns 8 and 9 of Table 2) or the cDNA contained in Clone ID NO:Z may be analyzed using the default parameters of the DNASTAR computer algorithm (DNASTAR, Inc., 1228 S. Park St., Madison, Wis. 53715 USA; http://www.dnastar.com/).

[0150] Polypeptide regions that may be routinely obtained using the DNASTAR computer algorithm include, but are not limited to, Garnier-Robson alpha-regions, beta-regions, turn-regions, and coil-regions; Chou-Fasman alpha-regions, beta-regions, and turn-regions; Kyte-Doolittle hydrophilic regions and hydrophobic regions; Eisenberg alpha- and beta-amphipathic regions; Karplus-Schulz flexible regions; Emini surface-forming regions; and Jameson-Wolf regions of high antigenic index. Among highly preferred polynucleotides of the invention in this regard are those that encode polypeptides comprising regions that combine several structural features, such as several (e.g., 1, 2, 3 or 4) of the features set out above.

[0151] Additionally, Kyte-Doolittle hydrophilic regions and hydrophobic regions, Emini surface-forming regions, and Jameson-Wolf regions of high antigenic index (i.e., containing four or more contiguous amino acids having an antigenic index of greater than or equal to 1.5, as identified using the default parameters of the Jameson-Wolf program) can routinely be used to determine polypeptide regions that exhibit a high degree of potential for antigenicity. Regions of high antigenicity are determined from data by DNASTAR analysis by choosing values which represent regions of the polypeptide which are likely to be exposed on the surface of the polypeptide in an environment in which antigen recognition may occur in the process of initiation of an immune response.

[0152] Preferred polypeptide fragments of the invention are fragments comprising, or alternatively, consisting of, an amino acid sequence that displays a functional activity (e.g. biological activity) of the polypeptide sequence of which the amino acid sequence is a fragment. By a polypeptide displaying a “functional activity” is meant a polypeptide capable of one or more known functional activities associated with a full-length protein, such as, for example, biological activity, antigenicity, immunogenicity, and/or multimerization, as described herein.

[0153] Other preferred polypeptide fragments are biologically active fragments. Biologically active fragments are those exhibiting activity similar, but not necessarily identical, to an activity of the polypeptide of the present invention. The biological activity of the fragments may include an improved desired activity, or a decreased undesirable activity.

[0154] In preferred embodiments, polypeptides of the invention comprise, or alternatively consist of, one, two, three, four, five or more of the antigenic fragments of the polypeptide of SEQ ID NO:Y, or portions thereof. Polynucleotides encoding these polypeptides are also encompassed by the invention.

[0155] The present invention encompasses polypeptides comprising, or alternatively consisting of, an epitope of: the polypeptide sequence shown in SEQ ID NO:Y; a polypeptide sequence encoded by SEQ ID NO:X or the complementary strand thereto; the polypeptide sequence encoded by the portion of SEQ ID NO:X as defined in columns 8 and 9 of Table 2; the polypeptide sequence encoded by the portion of SEQ ID NO:B as defined in column 6 of Table 1B or the complement thereto; the polypeptide sequence encoded by the cDNA contained in Clone ID NO:Z; or the polypeptide sequence encoded by a polynucleotide that hybridizes to the sequence of SEQ ID NO:X, the complement of the sequence of SEQ ID NO:X, the complement of a portion of SEQ ID NO:X as defined in columns 8 and 9 of Table 2, or the cDNA sequence contained in Clone ID NO:Z under stringent hybridization conditions or alternatively, under lower stringency hybridization as defined supra. The present invention further encompasses polynucleotide sequences encoding an epitope of a polypeptide sequence of the invention (such as, for example, the sequence disclosed in SEQ ID NO:X, or a fragment thereof), polynucleotide sequences of the complementary strand of a polynucleotide sequence encoding an epitope of the invention, and polynucleotide sequences which hybridize to the complementary strand under stringent hybridization conditions or alternatively, under lower stringency hybridization conditions defined supra.

[0156] The term “epitopes,” as used herein, refers to portions of a polypeptide having antigenic or immunogenic activity in an animal, preferably a mammal, and most preferably in a human. In a preferred embodiment, the present invention encompasses a polypeptide comprising an epitope, as well as the polynucleotide encoding this polypeptide. An “immunogenic epitope,” as used herein, is defined as a portion of a protein that elicits an antibody response in an animal, as determined by any method known in the art, for example, by the methods for generating antibodies described infra. (See, for example, Geysen et al., Proc. Natl. Acad. Sci. USA 81:3998-4002 (1983)). The term “antigenic epitope,” as used herein, is defined as a portion of a protein to which an antibody can immunospecifically bind its antigen as determined by any method well known in the art, for example, by the immunoassays described herein. Immunospecific binding excludes non-specific binding but does not necessarily exclude cross- reactivity with other antigens. Antigenic epitopes need not necessarily be immunogenic.

[0157] Fragments which function as epitopes may be produced by any conventional means. (See, e.g., Houghten, R. A., Proc. Natl. Acad. Sci. USA 82:5131-5135 (1985) further described in U.S. Pat. No. 4,631,211.)

[0158] In the present invention, antigenic epitopes preferably contain a sequence of at least 4, at least 5, at least 6, at least 7, more preferably at least 8, at least 9, at least 10, at least 11, at least 12, at least 13, at least 14, at least 15, at least 20, at least 25, at least 30, at least 40, at least 50, and, most preferably, between about 15 to about 30 amino acids. Preferred polypeptides comprising immunogenic or antigenic epitopes are at least 10, 15, 20, 25, 30, 35, 40, 45, 50, 55, 60, 65, 70, 75, 80, 85, 90, 95, or 100 amino acid residues in length. Additional non-exclusive preferred antigenic epitopes include the antigenic epitopes disclosed herein, as well as portions thereof. Antigenic epitopes are useful, for example, to raise antibodies, including monoclonal antibodies, that specifically bind the epitope. Preferred antigenic epitopes include the antigenic epitopes disclosed herein, as well as any combination of two, three, four, five or more of these antigenic epitopes. Antigenic epitopes can be used as the target molecules in immunoassays. (See, for instance, Wilson et al., Cell 37:767-778 (1984); Sutcliffe et al., Science 219:660-666 (1983)).

[0159] Non-limiting examples of epitopes of polypeptides that can be used to generate antibodies of the invention include a polypeptide comprising, or alternatively consisting of, at least one, two, three, four, five, six or more of the portion(s) of SEQ ID NO:Y specified in column 7 of Table 1A. These polypeptide fragments have been determined to bear antigenic epitopes of the proteins of the invention by the analysis of the Jameson-Wolf antigenic index which is included in the DNAStar suite of computer programs. By “comprise” it is intended that a polypeptide contains at least one, two, three, four, five, six or more of the portion(s) of SEQ ID NO:Y shown in column 7 of Table 1A, but it may contain additional flanking residues on either the amino or carboxyl termini of the recited portion. Such additional flanking sequences are preferably sequences naturally found adjacent to the portion; i.e., contiguous sequence shown in SEQ ID NO:Y. The flanking sequence may, however, be sequences from a heterolgous polypeptide, such as from another protein described herein or from a heterologous polypeptide not described herein. In particular embodiments, epitope portions of a polypeptide of the invention comprise one, two, three, or more of the portions of SEQ ID NO:Y shown in column 7 of Table 1A.

[0160] Similarly, immunogenic epitopes can be used, for example, to induce antibodies according to methods well known in the art. See, for instance, Sutcliffe et al., supra; Wilson et al., supra; Chow et al., Proc. Natl. Acad. Sci. USA 82:910-914; and Bittle et al., J. Gen. Virol. 66:2347-2354 (1985). Preferred immunogenic epitopes include the immunogenic epitopes disclosed herein, as well as any combination of two, three, four, five or more of these immunogenic epitopes. The polypeptides comprising one or more immunogenic epitopes may be presented for eliciting an antibody response together with a carrier protein, such as an albumin, to an animal system (such as rabbit or mouse), or, if the polypeptide is of sufficient length (at least about 25 amino acids), the polypeptide may be presented without a carrier. However, immunogenic epitopes comprising as few as 8 to 10 amino acids have been shown to be sufficient to raise antibodies capable of binding to, at the very least, linear epitopes in a denatured polypeptide (e.g., in Western blotting).

[0161] Epitope-bearing polypeptides of the present invention may be used to induce antibodies according to methods well known in the art including, but not limited to, in vivo immunization, in vitro immunization, and phage display methods. See, e.g., Sutcliffe et al., supra; Wilson et al., supra, and Bittle et al., J. Gen. Virol., 66:2347-2354 (1985). If in vivo immunization is used, animals may be immunized with free peptide; however, anti-peptide antibody titer may be boosted by coupling the peptide to a macromolecular carrier, such as keyhole limpet hemacyanin (KLH) or tetanus toxoid. For instance, peptides containing cysteine residues may be coupled to a carrier using a linker such as mialeimidobenzoyl-N-hydroxysuccinimide ester (MBS), while other peptides may be coupled to carriers using a more general linking agent such as glutaraldehyde. Animals such as rabbits, rats and mice are immunized with either free or carrier-coupled peptides, for instance, by intraperitoneal and/or intradermal injection of emulsions containing about 100 μg of peptide or carrier protein and Freund's adjuvant or any other adjuvant known for stimulating an immune response. Several booster injections may be needed, for instance, at intervals of about two weeks, to provide a useful titer of anti-peptide antibody which can be detected, for example, by ELISA assay using free peptide adsorbed to a solid surface. The titer of anti-peptide antibodies in serum from an immunized animal may be increased by selection of anti-peptide antibodies, for instance, by adsorption to the peptide on a solid support and elution of the selected antibodies according to methods well known in the art.

[0162] As one of skill in the art will appreciate, and as discussed above, the polypeptides of the present invention (e.g., those comprising an immunogenic or antigenic epitope) can be fused to heterologous polypeptide sequences. For example, polypeptides of the present invention (including fragments or variants thereof), may be fused with the constant domain of immunoglobulins (IgA, IgE, IgG, IgM), or portions thereof (CH1, CH2, CH3, or any combination thereof and portions thereof, resulting in chimeric polypeptides. By way of another non-limiting example, polypeptides and/or antibodies of the present invention (including fragments or variants thereof) may be fused with albumin (including but not limited to recombinant human serum albumin or fragments or variants thereof (see, e.g., U.S. Pat. No. 5,876,969, issued Mar. 2, 1999, EP Patent 0 413 622, and U.S. Pat. No. 5,766,883, issued Jun. 16, 1998, herein incorporated by reference in their entirety)). In a preferred embodiment, polypeptides and/or antibodies of the present invention (including fragments or variants thereof) are fused with the mature form of human serum albumin (i.e., amino acids 1 -585 of human serum albumin as shown in FIGS. 1 and 2 of EP Patent 0 322 094) which is herein incorporated by reference in its entirety. In another preferred embodiment, polypeptides and/or antibodies of the present invention (including fragments or variants thereof) are fused with polypeptide fragments comprising, or alternatively consisting of, amino acid residues 1-z of human serum albumin, where z is an integer from 369 to 419, as described in U.S. Pat. No. 5,766,883 herein incorporated by reference in its entirety. Polypeptides and/or antibodies of the present invention (including fragments or variants thereof) may be fused to either the N- or C-terminal end of the heterologous protein (e.g., immunoglobulin Fc polypeptide or human serum albumin polypeptide). Polynucleotides encoding fusion proteins of the invention are also encompassed by the invention.

[0163] Such fusion proteins as those described above may facilitate purification and may increase half-life in vivo. This has been shown for chimeric proteins consisting of the first two domains of the human CD4-polypeptide and various domains of the constant regions of the heavy or light chains of mammalian immunoglobulins. See, e.g., EP 394,827; Traunecker et al., Nature, 331:84-86 (1988). Enhanced delivery of an antigen across the epithelial barrier to the immune system has been demonstrated for antigens (e.g., insulin) conjugated to an FcRn binding partner such as IgG or Fc fragments (see, e.g., PCT Publications WO 96/22024 and WO 99/04813). IgG fusion proteins that have a disulfide-linked dimeric structure due to the IgG portion desulfide bonds have also been found to be more efficient in binding and neutralizing other molecules than monomeric polypeptides or fragments thereof alone. See, e.g., Fountoulakis et al., J. Biochem., 270:3958-3964 (1995). Nucleic acids encoding the above epitopes can also be recombined with a gene of interest as an epitope tag (e.g., the hemagglutinin (HA) tag or flag tag) to aid in detection and purification of the expressed polypeptide. For example, a system described by Janknecht et al. allows for the ready purification of non-denatured fusion proteins expressed in human cell lines (Janknecht et al., 1991, Proc. Natl. Acad. Sci. USA 88:8972-897). In this system, the gene of interest is subcloned into a vaccinia recombination plasmid such that the open reading frame of the gene is translationally fused to an amino-terminal tag consisting of six histidine residues. The tag serves as a matrix binding domain for the fusion protein. Extracts from cells infected with the recombinant vaccinia virus are loaded onto Ni2+ nitriloacetic acid-agarose column and histidine-tagged proteins can be selectively eluted with imidazole-containing buffers.

[0164] Fusion Proteins

[0165] Any polypeptide of the present invention can be used to generate fusion proteins. For example, the polypeptide of the present invention, when fused to a second protein, can be used as an antigenic tag. Antibodies raised against the polypeptide of the present invention can be used to indirectly detect the second protein by binding to the polypeptide. Moreover, because secreted proteins target cellular locations based on trafficking signals, polypeptides of the present invention which are shown to be secreted can be used as targeting molecules once fused to other proteins.

[0166] Examples of domains that can be fused to polypeptides of the present invention include not only heterologous signal sequences, but also other heterologous functional regions. The fusion does not necessarily need to be direct, but may occur through linker sequences.

[0167] In certain preferred embodiments, proteins of the invention are fusion proteins comprising an amino acid sequence that is an N and/or C- terminal deletion of a polypeptide of the invention. In preferred embodiments, the invention is directed to a fusion protein comprising an amino acid sequence that is at least 90%, 95%, 96%, 97%, 98% or 99% identical to a polypeptide sequence of the invention. Polynucleotides encoding these proteins are also encompassed by the invention.

[0168] Moreover, fusion proteins may also be engineered to improve characteristics of the polypeptide of the present invention. For instance, a region of additional amino acids, particularly charged amino acids, may be added to the N-terminus of the polypeptide to improve stability and persistence during purification from the host cell or subsequent handling and storage. Also, peptide moieties may be added to the polypeptide to facilitate purification. Such regions may be removed prior to final preparation of the polypeptide. The addition of peptide moieties to facilitate handling of polypeptides are familiar and routine techniques in the art.

[0169] As one of skill in the art will appreciate that, as discussed above, polypeptides of the present invention, and epitope-bearing fragments thereof, can be combined with heterologous polypeptide sequences. For example, the polypeptides of the present invention may be fused with heterologous polypeptide sequences, for example, the polypeptides of the present invention may be fused with the constant domain of immunoglobulins (IgA, IgE, IgG, IgM) or portions thereof (CH1, CH2, CH3, and any combination thereof, including both entire domains and portions thereof), or albumin (including, but not limited to, native or recombinant human albumin or fragments or variants thereof (see, e.g., U.S. Pat. No. 5,876,969, issued Mar. 2, 1999, EP Patent 0 413 622, and U.S. Pat. No. 5,766,883, issued Jun. 16, 1998, herein incorporated by reference in their entirety)), resulting in chimeric polypeptides. For example, EP-A-O 464 533 (Canadian counterpart 2045869) discloses fusion proteins comprising various portions of constant region of immunoglobulin molecules together with another human protein or part thereof. In many cases, the Fc part in a fusion protein is beneficial in therapy and diagnosis, and thus can result in, for example, improved pharmacolinetic properties (EP-A 0232 262). Alternatively, deleting the Fc part after the fusion protein has been expressed, detected, and purified, would be desired. For example, the Fc portion may hinder therapy and diagnosis if the fusion protein is used as an antigen for immunizations. In drug discovery, for example, human proteins, such as hIL-5, have been fused with Fc portions for the purpose of high-throughput screening assays to identify antagonists of hIL-5. See, D. Bennett et al., J. Molecular Recognition 8:52-58 (1995); K. Johanson et al., J. Biol. Chem. 270:9459-9471 (1995).

[0170] Moreover, the polypeptides of the present invention can be fused to marker sequences, such as a polypeptide which facilitates purification of the fused polypeptide. In preferred embodiments, the marker amino acid sequence is a hexa-histidine peptide, such as the tag provided in a pQE vector (QIAGEN, Inc., 9259 Eton Avenue, Chatsworth, Calif., 91311), among others, many of which are commercially available. As described in Gentz et al., Proc. Natl. Acad. Sci. USA 86:821-824 (1989), for instance, hexa-histidine provides for convenient purification of the fusion protein. Another peptide tag useful for purification, the “HA” tag, corresponds to an epitope derived from the influenza hemagglutinin protein (Wilson et al., Cell 37:767 (1984)).

[0171] Additional fusion proteins of the invention may be generated through the techniques of gene-shuffling, motif-shuffling, exon-shuffling, and/or codon-shuffling (collectively referred to as “DNA shuffling”). DNA shuffling may be employed to modulate the activities of polypeptides of the invention, such methods can be used to generate polypeptides with altered activity, as well as agonists and antagonists of the polypeptides. See, generally, U.S. Pat. Nos. 5,605,793; 5,811,238; 5,830,721; 5,834,252; and 5,837,458, and Patten et al., Curr. Opinion Biotechnol. 8:724-33 (1997); Harayama, Trends Biotechnol. 16(2):76-82 (1998); Hansson, et al., J. Mol. Biol. 287:265-76 (1999); and Lorenzo and Blasco, Biotechniques 24(2):308-13 (1998) (each of these patents and publications are hereby incorporated by reference in its entirety). In one embodiment, alteration of polynucleotides corresponding to SEQ ID NO:X and the polypeptides encoded by these polynucleotides may be achieved by DNA shuffling. DNA shuffling involves the assembly of two or more DNA segments by homologous or site-specific recombination to generate variation in the polynucleotide sequence. In another embodiment, polynucleotides of the invention, or the encoded polypeptides, may be altered by being subjected to random mutagenesis by error-prone PCR, random nucleotide insertion or other methods prior to recombination. In another embodiment, one or more components, motifs, sections, parts, domains, fragments, etc., of a polynucleotide encoding a polypeptide of the invention may be recombined with one or more components, motifs, sections, parts, domains, fragments, etc. of one or more heterologous molecules.

[0172] Thus, any of these above fusions can be engineered using the polynucleotides or the polypeptides of the present invention.

[0173] Recombinant and Synthetic Production of Polypeptides of the Invention

[0174] The present invention also relates to vectors containing the polynucleotide of the present invention, host cells, and the production of polypeptides by synthetic and recombinant techniques. The vector may be, for example, a phage, plasmid, viral, or retroviral vector. Retroviral vectors may be replication competent or replication defective. In the latter case, viral propagation generally will occur only in complementing host cells.

[0175] The polynucleotides of the invention may be joined to a vector containing a selectable marker for propagation in a host. Generally, a plasmid vector is introduced in a precipitate, such as a calcium phosphate precipitate, or in a complex with a charged lipid. If the vector is a virus, it may be packaged in vitro using an appropriate packaging cell line and then transduced into host cells.

[0176] The polynucleotide insert should be operatively linked to an appropriate promoter, such as the phage lambda PL promoter, the E. coli lac, trp, phoA and tac promoters, the SV40 early and late promoters and promoters of retroviral LTRs, to name a few. Other suitable promoters will be known to the skilled artisan. The expression constructs will further contain sites for transcription initiation, termination, and, in the transcribed region, a ribosome binding site for translation. The coding portion of the transcripts expressed by the constructs will preferably include a translation initiating codon at the beginning and a termination codon (UAA, UGA or UAG) appropriately positioned at the end of the polypeptide to be translated.

[0177] As indicated, the expression vectors will preferably include at least one selectable marker. Such markers include dihydrofolate reductase, G418, glutamine synthase, or neomycin resistance for eukaryotic cell culture, and tetracycline, kanamycin or ampicillin resistance genes for culturing in E. coli and other bacteria. Representative examples of appropriate hosts include, but are not limited to, bacterial cells, such as E. coli, Streptomyces and Salmonella typhimurium cells; fungal cells, such as yeast cells (e.g., Saccharomyces cerevisiae or Pichia pastoris (ATCC Accession No. 201178)); insect cells such as Drosophila S2 and Spodoptera Sf9 cells; animal cells such as CHO, COS, 293, and Bowes melanoma cells; and plant cells. Appropriate culture mediums and conditions for the above-described host cells are known in the art.

[0178] Among vectors preferred for use in bacteria include pQE70, pQE60 and pQE-9, available from QIAGEN, Inc.; pBluescript vectors, Phagescript vectors, pNH8A, pNH16a, pNH18A, pNH46A, available from Stratagene Cloning Systems, Inc.; and ptrc99a, pKK223-3, pKK233-3, pDR540, pRIT5 available from Pharmacia Biotech, Inc. Among preferred eukaryotic vectors are pWLNEO, pSV2CAT, pOG44, pXT1 and pSG available from Stratagene; and pSVK3, pBPV, pMSG and pSVL available from Pharmacia. Preferred expression vectors for use in yeast systems include, but are not limited to pYES2, pYD1, pTEF1/Zeo, pYES2/GS, pPICZ, pGAPZ, pGAPZalph, pPIC9, pPIC3.5, pHIL-D2, pHIL-S1, pPIC3.5K, pPIC9K, and PAO815 (all available from Invitrogen, Carlbad, Calif.). Other suitable vectors will be readily apparent to the skilled artisan.

[0179] Vectors which use glutamine synthase (GS) or DHFR as the selectable markers can be amplified in the presence of the drugs methionine sulphoximine or methotrexate, respectively. An advantage of glutamine synthase based vectors are the availabilty of cell lines (e.g., the murine myeloma cell line, NSO) which are glutamine synthase negative. Glutamine synthase expression systems can also function in glutamine synthase expressing cells (e.g., Chinese Hamster Ovary (CHO) cells) by providing additional inhibitor to prevent the functioning of the endogenous gene. A glutamine synthase expression system and components thereof are detailed in PCT publications: WO87/04462; WO86/05807; WO89/01036; WO89/10404; and WO91/06657, which are hereby incorporated in their entireties by reference herein. Additionally, glutamine synthase expression vectors can be obtained from Lonza Biologics, Inc. (Portsmouth, N.H.). Expression and production of monoclonal antibodies using a GS expression system in murine myeloma cells is described in Bebbington et al., Bio/technology 10:169(1992) and in Biblia and Robinson Biotechnol. Prog. 11:1 (1995) which are herein incorporated by reference.

[0180] The present invention also relates to host cells containing the above-described vector constructs described herein, and additionally encompasses host cells containing nucleotide sequences of the invention that are operably associated with one or more heterologous control regions (e.g., promoter and/or enhancer) using techniques known of in the art. The host cell can be a higher eukaryotic cell, such as a mammalian cell (e.g., a human derived cell), or a lower eukaryotic cell, such as a yeast cell, or the host cell can be a prokaryotic cell, such as a bacterial cell. A host strain may be chosen which modulates the expression of the inserted gene sequences, or modifies and processes the gene product in the specific fashion desired. Expression from certain promoters can be elevated in the presence of certain inducers; thus expression of the genetically engineered polypeptide may be controlled. Furthermore, different host cells have characteristics and specific mechanisms for the translational and post-translational processing and modification (e.g., phosphorylation, cleavage) of proteins. Appropriate cell lines can be chosen to ensure the desired modifications and processing of the foreign protein expressed.

[0181] Introduction of the nucleic acids and nucleic acid constructs of the invention into the host cell can be effected by calcium phosphate transfection, DEAE-dextran mediated transfection, cationic lipid-mediated transfection, electroporation, transduction, infection, or other methods. Such methods are described in many standard laboratory manuals, such as Davis et al., Basic Methods In Molecular Biology (1986). It is specifically contemplated that the polypeptides of the present invention may in fact be expressed by a host cell lacking a recombinant vector.

[0182] In addition to encompassing host cells containing the vector constructs discussed herein, the invention also encompasses primary, secondary, and immortalized host cells of vertebrate origin, particularly mammalian origin, that have been engineered to delete or replace endogenous genetic material (e.g., the coding sequence), and/or to include genetic material (e.g., heterologous polynucleotide sequences) that is operably associated with polynucleotides of the invention, and which activates, alters, and/or amplifies endogenous polynucleotides. For example, techniques known in the art may be used to operably associate heterologous control regions (e.g., promoter and/or enhancer) and endogenous polynucleotide sequences via homologous recombination (see, e.g., U.S. Pat. No. 5,641,670, issued Jun. 24, 1997; International Publication Number WO 96/29411; International Publication Number WO 94/12650; Koller et al., Proc. Natl. Acad. Sci. USA 86:8932-8935 (1989); and Zijlstra et al., Nature 342:435-438 (1989), the disclosures of each of which are incorporated by reference in their entireties).

[0183] Polypeptides of the invention can be recovered and purified from recombinant cell cultures by well-known methods including ammonium sulfate or ethanol precipitation, acid extraction, anion or cation exchange chromatography, phosphocellulose chromatography, hydrophobic interaction chromatography, affinity chromatography, hydroxylapatite chromatography and lectin chromatography. Most preferably, high performance liquid chromatography (“HPLC”) is employed for purification.

[0184] Polypeptides of the present invention can also be recovered from: products purified from natural sources, including bodily fluids, tissues and cells, whether directly isolated or cultured; products of chemical synthetic procedures; and products produced by recombinant techniques from a prokaryotic or eukaryotic host, including, for example, bacterial, yeast, higher plant, insect, and mammalian cells. Depending upon the host employed in a recombinant production procedure, the polypeptides of the present invention may be glycosylated or may be non-glycosylated. In addition, polypeptides of the invention may also include an initial modified methionine residue, in some cases as a result of host-mediated processes. Thus, it is well known in the art that the N-terminal methionine encoded by the translation initiation codon generally is removed with high efficiency from any protein after translation in all eukaryotic cells. While the N-terminal methionine on most proteins also is efficiently removed in most prokaryotes, for some proteins, this prokaryotic removal process is inefficient, depending on the nature of the amino acid to which the N-terminal methionine is covalently linked.

[0185] In one embodiment, the yeast Pichia pastoris is used to express polypeptides of the invention in a eukaryotic system. Pichia pastoris is a methylotrophic yeast which can metabolize methanol as its sole carbon source. A main step in the methanol metabolization pathway is the oxidation of methanol to formaldehyde using O₂. This reaction is catalyzed by the enzyme alcohol oxidase. In order to metabolize methanol as its sole carbon source, Pichia pastoris must generate high levels of alcohol oxidase due, in part, to the relatively low affinity of alcohol oxidase for O₂. Consequently, in a growth medium depending on methanol as a main carbon source, the promoter region of one of the two alcohol oxidase genes (AOXI) is highly active. In the presence of methanol, alcohol oxidase produced from the AOXI gene comprises up to approximately 30% of the total soluble protein in Pichia pastoris. See Ellis, S. B., et al., Mol. Cell. Biol. 5:1111-21 (1985); Koutz, P. J, et al., Yeast 5:167-77 (1989); Tschopp, J. F., et al., Nucl. Acids Res. 15:3859-76 (1987). Thus, a heterologous coding sequence, such as, for example, a polynucleotide of the present invention, under the transcriptional regulation of all or part of the AOXI regulatory sequence is expressed at exceptionally high levels in Pichia yeast grown in the presence of methanol.

[0186] In one example, the plasmid vector pPIC9K is used to express DNA encoding a polypeptide of the invention, as set forth herein, in a Pichea yeast system essentially as described in “Pichia Protocols: Methods in Molecular Biology,” D. R. Higgins and J. Cregg, eds. The Humana Press, Totowa, N.J., 1998. This expression vector allows expression and secretion of a polypeptide of the invention by virtue of the strong AOXI promoter linked to the Pichia pastoris alkaline phosphatase (PHO) secretory signal peptide (i.e., leader) located upstream of a multiple cloning site.

[0187] Many other yeast vectors could be used in place of pPIC9K, such as, pYES2, pYD1, pTEF1/Zeo, pYES2/GS, pPICZ, pGAPZ, pGAPZalpha, pPIC9, pPIC3.5, pHIL-D2, pHIL-S1, pPIC3.5K, and PAO815, as one skilled in the art would readily appreciate, as long as the proposed expression construct provides appropriately located signals for transcription, translation, secretion (if desired), and the like, including an in-frame AUG as required.

[0188] In another embodiment, high-level expression of a heterologous coding sequence, such as, for example, a polynucleotide of the present invention, may be achieved by cloning the heterologous polynucleotide of the invention into an expression vector such as, for example, pGAPZ or pGAPZalpha, and growing the yeast culture in the absence of methanol.

[0189] In addition to encompassing host cells containing the vector constructs discussed herein, the invention also encompasses primary, secondary, and immortalized host cells of vertebrate origin, particularly mammalian origin, that have been engineered to delete or replace endogenous genetic material (e.g., coding sequence), and/or to include genetic material (e.g., heterologous polynucleotide sequences) that is operably associated with polynucleotides of the invention, and which activates, alters, and/or amplifies endogenous polynucleotides. For example, techniques known in the art may be used to operably associate heterologous control regions (e.g., promoter and/or enhancer) and endogenous polynucleotide sequences via homologous recombination (see, e.g., U.S. Pat. No. 5,641,670, issued Jun. 24, 1997; International Publication No. WO 96/29411, published Sep. 26, 1996; International Publication No. WO 94/12650, published Aug. 4, 1994; Koller et al., Proc. Natl. Acad. Sci. USA 86:8932-8935 (1989); and Zijlstra et al., Nature 342:435-438 (1989), the disclosures of each of which are incorporated by reference in their entireties).

[0190] In addition, polypeptides of the invention can be chemically synthesized using techniques known in the art (e.g., see Creighton, 1983, Proteins: Structures and Molecular Principles, W. H. Freeman & Co., N.Y., and Hunkapiller et al., Nature, 310:105-111 (1984)). For example, a polypeptide corresponding to a fragment of a polypeptide can be synthesized by use of a peptide synthesizer. Furthermore, if desired, nonclassical amino acids or chemical amino acid analogs can be introduced as a substitution or addition into the polypeptide sequence. Non-classical amino acids include, but are not limited to, to the D-isomers of the common amino acids, 2,4-diaminobutyric acid, a-amino isobutyric acid, 4-aminobutyric acid, Abu, 2-amino butyric acid, g-Abu, e-Ahx, 6-amino hexanoic acid, Aib, 2-amino isobutyric acid, 3-amino propionic acid, ornithine, norleucine, norvaline, hydroxyproline, sarcosine, citrulline, homocitrulline, cysteic acid, t-butylglycine, t-butylalanine, phenylglycine, cyclohexylalanine, b-alanine, fluoro-amino acids, designer amino acids such as b-methyl amino acids, Ca-methyl amino acids, Na-methyl amino acids, and amino acid analogs in general. Furthermore, the amino acid can be D (dextrorotary) or L (levorotary).

[0191] The invention encompasses polypeptides of the present invention which are differentially modified during or after translation, e.g., by glycosylation, acetylation, phosphorylation, amidation, derivatization by known protecting/blocking groups, proteolytic cleavage, linkage to an antibody molecule or other cellular ligand, etc. Any of numerous chemical modifications may be carried out by known techniques, including but not limited, to specific chemical cleavage by cyanogen bromide, trypsin, chymotrypsin, papain, V8 protease, NaBH₄; acetylation, formylation, oxidation, reduction; metabolic synthesis in the presence of tunicamycin; etc.

[0192] Additional post-translational modifications encompassed by the invention include, for example, e.g., N-linked or O-linked carbohydrate chains, processing of N-terminal or C-terminal ends), attachment of chemical moieties to the amino acid backbone, chemical modifications of N-linked or O-linked carbohydrate chains, and addition or deletion of an N-terminal methionine residue as a result of procaryotic host cell expression. The polypeptides may also be modified with a detectable label, such as an enzymatic, fluorescent, isotopic or affinity label to allow for detection and isolation of the protein.

[0193] Examples of suitable enzymes include horseradish peroxidase, alkaline phosphatase, beta-galactosidase, or acetylcholinesterase; examples of suitable prosthetic group complexes include streptavidin/biotin and avidin/biotin; examples of suitable fluorescent materials include umbelliferone, fluorescein, fluorescein isothiocyanate, rhodamine, dichlorotriazinylamine fluorescein, dansyl chloride or phycoerythrin; an example of a luminescent material includes luminol; examples of bioluminescent materials include luciferase, luciferin, and aequorin; and examples of suitable radioactive material include iodine (¹²¹I, ¹²³I, ¹²⁵I, ¹³¹I) carbon (¹⁴C), sulfur (³⁵), tritium (³H), indium (¹¹¹In, ¹¹²In, ^{113m}In, ^{115m}In), technetium (⁹⁹Tc,^{99m}Tc), thallium (²⁰¹Ti), gallium (⁶⁸Ga, ⁶⁷Ga), palladium (¹⁰³Pd), molybdenum (⁹⁹Mo), xenon (¹³³Xe), fluorine (¹⁸F), ¹⁵³Sm, ¹⁷⁷Lu, ¹⁵⁹Gd, ¹⁴⁹PM, ¹⁴⁰La, ¹⁷⁵Yb, ¹⁶⁶Ho, ⁹⁰Y, ⁴⁷SC, ¹⁸⁶Re, ¹⁸⁸Re, ¹⁴²Pr, ¹⁰⁵Rh, and ⁹⁷Ru.

[0194] In specific embodiments, a polypeptide of the present invention or fragment or variant thereof is attached to macrocyclic chelators that associate with radiometal ions, including but not limited to, ¹⁷⁷Lu, ⁹⁰Y, ¹⁶⁶Ho, and ¹⁵³Sm, to polypeptides. In a preferred embodiment, the radiometal ion associated with the macrocyclic chelators is ¹¹¹In. In another preferred embodiment, the radiometal ion associated with the macrocyclic chelator is ⁹⁰Y. In specific embodiments, the macrocyclic chelator is 1,4,7,10-tetraazacyclododecane-N,N′,N″,N′″-tetraacetic acid (DOTA). In other specific embodiments, DOTA is attached to an antibody of the invention or fragment thereof via a linker molecule. Examples of linker molecules useful for conjugating DOTA to a polypeptide are commonly known in the art—see, for example, DeNardo et al., Clin Cancer Res. 4(10):2483-90 (1998); Peterson et al., Bioconjug. Chem. 10(4):553-7 (1999); and Zimmerman et al, Nucl. Med. Biol. 26(8):943-50 (1999); which are hereby incorporated by reference in their entirety.

[0195] As mentioned, the proteins of the invention may be modified by either natural processes, such as posttranslational processing, or by chemical modification techniques which are well known in the art. It will be appreciated that the same type of modification may be present in the same or varying degrees at several sites in a given polypeptide. Polypeptides of the invention may be branched, for example, as a result of ubiquitination, and they may be cyclic, with or without branching. Cyclic, branched, and branched cyclic polypeptides may result from posttranslation natural processes or may be made by synthetic methods. Modifications include acetylation, acylation, ADP-ribosylation, amidation, covalent attachment of flavin, covalent attachment of a heme moiety, covalent attachment of a nucleotide or nucleotide derivative, covalent attachment of a lipid or lipid derivative, covalent attachment of phosphotidylinositol, cross-linking, cyclization, disulfide bond formation, demethylation, formation of covalent cross-links, formation of cysteine, formation of pyroglutamate, formylation, gamma-carboxylation, glycosylation, GPI anchor formation, hydroxylation, iodination, methylation, myristoylation, oxidation, pegylation, proteolytic processing, phosphorylation, prenylation, racemization, selenoylation, sulfation, transfer-RNA mediated addition of amino acids to proteins such as arginylation, and ubiquitination. (See, for instance, PROTEINS—STRUCTURE AND MOLECULAR PROPERTIES, 2nd Ed., T. E. Creighton, W. H. Freeman and Company, New York (1993); POSTTRANSLATIONAL COVALENT MODIFICATION OF PROTEINS, B. C. Johnson, Ed., Academic Press, New York, pgs. 1-12 (1983); Seifter et al., Meth. Enzymol. 182:626-646 (1990); Rattan et al., Ann. N.Y. Acad. Sci. 663:48-62 (1992)).

[0196] Also provided by the invention are chemically modified derivatives of the polypeptides of the invention which may provide additional advantages such as increased solubility, stability and circulating time of the polypeptide, or decreased immunogenicity (see U.S. Pat. No. 4,179,337). The chemical moieties for derivitization may be selected from water soluble polymers such as polyethylene glycol, ethylene glycol/propylene glycol copolymers, carboxymethylcellulose, dextran, polyvinyl alcohol and the like. The polypeptides may be modified at random positions within the molecule, or at predetermined positions within the molecule and may include one, two, three or more attached chemical moieties.

[0197] The polymer may be of any molecular weight, and may be branched or unbranched. For polyethylene glycol, the preferred molecular weight is between about 1 kDa and about 100 kDa (the term “about” indicating that in preparations of polyethylene glycol, some molecules will weigh more, some less, than the stated molecular weight) for ease in handling and manufacturing. Other sizes may be used, depending on the desired therapeutic profile (e.g., the duration of sustained release desired, the effects, if any on biological activity, the ease in handling, the degree or lack of antigenicity and other known effects of the polyethylene glycol to a therapeutic protein or analog). For example, the polyethylene glycol may have an average molecular weight of about 200, 500, 1000, 1500, 2000, 2500, 3000, 3500, 4000, 4500, 5000, 5500, 6000, 6500, 7000, 7500, 8000, 8500, 9000, 9500, 10,000, 10,500, 11,000, 11,500, 12,000, 12,500, 13,000, 13,500, 14,000, 14,500, 15,000, 15,500, 16,000, 16,500, 17,000, 17,500, 18,000, 18,500, 19,000, 19,500, 20,000, 25,000, 30,000, 35,000, 40,000, 45,000, 50,000, 55,000, 60,000, 65,000, 70,000, 75,000, 80,000, 85,000, 90,000, 95,000, or 100,000 kDa.

[0198] As noted above, the polyethylene glycol may have a branched structure. Branched polyethylene glycols are described, for example, in U.S. Pat. No. 5,643,575; Morpurgo et al., Appl. Biochem. Biotechnol. 56:59-72 (1996); Vorobjev et al., Nucleosides Nucleotides 18:2745-2750 (1999); and Caliceti et al., Bioconjug. Chem. 10:638-646 (1999), the disclosures of each of which are incorporated herein by reference.

[0199] The polyethylene glycol molecules (or other chemical moieties) should be attached to the protein with consideration of effects on functional or antigenic domains of the protein. There are a number of attachment methods available to those skilled in the art, such as, for example, the method disclosed in EP 0 401 384 (coupling PEG to G-CSF), herein incorporated by reference; see also Malik et al., Exp. Hematol. 20:1028-1035 (1992), reporting pegylation of GM-CSF using tresyl chloride. For example, polyethylene glycol may be covalently bound through amino acid residues via a reactive group, such as a free amino or carboxyl group. Reactive groups are those to which an activated polyethylene glycol molecule may be bound. The amino acid residues having a free amino group may include lysine residues and the N-terminal amino acid residues; those having a free carboxyl group may include aspartic acid residues glutamic acid residues and the C-terminal amino acid residue. Sulfhydryl groups may also be used as a reactive group for attaching the polyethylene glycol molecules. Preferred for therapeutic purposes is attachment at an amino group, such as attachment at the N-terminus or lysine group.

[0200] As suggested above, polyethylene glycol may be attached to proteins via linkage to any of a number of amino acid residues. For example, polyethylene glycol can be linked to proteins via covalent bonds to lysine, histidine, aspartic acid, glutamic acid, or cysteine residues. One or more reaction chemistries may be employed to attach polyethylene glycol to specific amino acid residues (e.g., lysine, histidine, aspartic acid, glutamic acid, or cysteine) of the protein or to more than one type of amino acid residue (e.g., lysine, histidine, aspartic acid, glutamic acid, cysteine and combinations thereof) of the protein.

[0201] One may specifically desire proteins chemically modified at the N-terminus. Using polyethylene glycol as an illustration of the present composition, one may select from a variety of polyethylene glycol molecules (by molecular weight, branching, etc.), the proportion of polyethylene glycol molecules to protein (polypeptide) molecules in the reaction mix, the type of pegylation reaction to be performed, and the method of obtaining the selected N-terminally pegylated protein. The method of obtaining the N-terminally pegylated preparation (i.e., separating this moiety from other monopegylated moieties if necessary) may be by purification of the N-terminally pegylated material from a population of pegylated protein molecules. Selective proteins chemically modified at the N-terminus modification may be accomplished by reductive alkylation which exploits differential reactivity of different types of primary amino groups (lysine versus the N-terminal) available for derivatization in a particular protein. Under the appropriate reaction conditions, substantially selective derivatization of the protein at the N-terminus with a carbonyl group containing polymer is achieved.

[0202] As indicated above, pegylation of the proteins of the invention may be accomplished by any number of means. For example, polyethylene glycol may be attached to the protein either directly or by an intervening linker. Linkerless systems for attaching polyethylene glycol to proteins are described in Delgado et al., Crit. Rev. Thera. Drug Carrier Sys. 9:249-304 (1992); Francis et al., Intern. J. of Hematol. 68:1-18 (1998); U.S. Pat. No. 4,002,531; U.S. Pat. No. 5,349,052; WO 95/06058; and WO 98/32466, the disclosures of each of which are incorporated herein by reference.

[0203] One system for attaching polyethylene glycol directly to amino acid residues of proteins without an intervening linker employs tresylated MPEG, which is produced by the modification of monmethoxy polyethylene glycol (MPEG) using tresylchloride (ClSO₂CH₂CF₃). Upon reaction of protein with tresylated MPEG, polyethylene glycol is directly attached to amine groups of the protein. Thus, the invention includes protein-polyethylene glycol conjugates produced by reacting proteins of the invention with a polyethylene glycol molecule having a 2,2,2-trifluoreothane sulphonyl group.

[0204] Polyethylene glycol can also be attached to proteins using a number of different intervening linkers. For example, U.S. Pat. No. 5,612,460, the entire disclosure of which is incorporated herein by reference, discloses urethane linkers for connecting polyethylene glycol to proteins. Protein-polyethylene glycol conjugates wherein the polyethylene glycol is attached to the protein by a linker can also be produced by reaction of proteins with compounds such as MPEG-succinimidylsuccinate, MPEG activated with 1,1′-carbonyldiimidazole, MPEG-2,4,5-trichloropenylcarbonate, MPEG-p-nitrophenolcarbonate, and various MPEG-succinate derivatives. A number of additional polyethylene glycol derivatives and reaction chemistries for attaching polyethylene glycol to proteins are described in International Publication No. WO 98/32466, the entire disclosure of which is incorporated herein by reference. Pegylated protein products produced using the reaction chemistries set out herein are included within the scope of the invention.

[0205] The number of polyethylene glycol moieties attached to each protein of the invention (i.e., the degree of substitution) may also vary. For example, the pegylated proteins of the invention may be linked, on average, to 1, 2, 3, 4, 5, 6, 7, 8, 9, 10, 12, 15, 17, 20, or more polyethylene glycol molecules. Similarly, the average degree of substitution within ranges such as 1-3, 2-4, 3-5, 4-6, 5-7, 6-8, 7-9, 8-10, 9-11, 10-12, 11-13, 12-14, 13-15, 14-16, 15-17, 16-18, 17-19, or 18-20 polyethylene glycol moieties per protein molecule. Methods for determining the degree of substitution are discussed, for example, in Delgado et al., Crit. Rev. Thera. Drug Carrier Sys. 9:249-304 (1992).

[0206] The polypeptides of the invention can be recovered and purified from chemical synthesis and recombinant cell cultures by standard methods which include, but are not limited to, ammonium sulfate or ethanol precipitation, acid extraction, anion or cation exchange chromatography, phosphocellulose chromatography, hydrophobic interaction chromatography, affinity chromatography, hydroxylapatite chromatography and lectin chromatography. Most preferably, high performance liquid chromatography (“HPLC”) is employed for purification. Well known techniques for refolding protein may be employed to regenerate active conformation when the polypeptide is denatured during isolation and/or purification.

[0207] The polypeptides of the invention may be in monomers or multimers (i.e., dimers, trimers, tetramers and higher multimers). Accordingly, the present invention relates to monomers and multimers of the polypeptides of the invention, their preparation, and compositions (preferably, Therapeutics) containing them. In specific embodiments, the polypeptides of the invention are monomers, dimers, trimers or tetramers. In additional embodiments, the multimers of the invention are at least dimers, at least trimers, or at least tetramers.

[0208] Multimers encompassed by the invention may be homorners or heteromers. As used herein, the term homomer refers to a multimer containing only polypeptides corresponding to a protein of the invention (e.g., the amino acid sequence of SEQ ID NO:Y, an amino acid sequence encoded by SEQ ID NO:X or the complement of SEQ ID NO:X, the amino acid sequence encoded by the portion of SEQ ID NO:X as defined in columns 8 and 9 of Table 2, and/or an amino acid sequence encoded by cDNA contained in Clone ID NO:Z (including fragments, variants, splice variants, and fusion proteins, corresponding to these as described herein)). These homomers may contain polypeptides having identical or different amino acid sequences. In a specific embodiment, a homomer of the invention is a multimer containing only polypeptides having an identical amino acid sequence. In another specific embodiment, a homomer of the invention is a multimer containing polypeptides having different amino acid sequences. In specific embodiments, the multimer of the invention is a homodimer (e.g., containing two polypeptides having identical or different amino acid sequences) or a homotrimer (e.g., containing three polypeptides having identical and/or different amino acid sequences). In additional embodiments, the homomeric multimer of the invention is at least a homodimer, at least a homotrimer, or at least a homotetramer.

[0209] As used herein, the term heteromer refers to a multimer containing one or more heterologous polypeptides (i.e., polypeptides of different proteins) in addition to the polypeptides of the invention. In a specific embodiment, the multimer of the invention is a heterodimer, a heterotrimer, or a heterotetramer. In additional embodiments, the heteromeric multimer of the invention is at least a heterodimer, at least a heterotrimer, or at least a heterotetramer.

[0210] Multimers of the invention may be the result of hydrophobic, hydrophilic, ionic and/or covalent associations and/or may be indirectly linked by, for example, liposome formation. Thus, in one embodiment, multimers of the invention, such as, for example, homodimers or homotrimers, are formed when polypeptides of the invention contact one another in solution. In another embodiment, heteromultimers of the invention, such as, for example, heterotrimers or heterotetramers, are formed when polypeptides of the invention contact antibodies to the polypeptides of the invention (including antibodies to the heterologous polypeptide sequence in a fusion protein of the invention) in solution. In other embodiments, multimers of the invention are formed by covalent associations with and/or between the polypeptides of the invention. Such covalent associations may involve one or more amino acid residues contained in the polypeptide sequence (e.g., that recited in SEQ ID NO:Y, encoded by the portion of SEQ ID NO:X as defined in columns 8 and 9 of Table 2, and/or encoded by the cDNA contained in Clone ID NO:Z). In one instance, the covalent associations are cross-linking between cysteine residues located within the polypeptide sequences which interact in the native (i.e., naturally occurring) polypeptide. In another instance, the covalent associations are the consequence of chemical or recombinant manipulation. Alternatively, such covalent associations may involve one or more amino acid residues contained in the heterologous polypeptide sequence in a fusion protein. In one example, covalent associations are between the heterologous sequence contained in a fusion protein of the invention (see, e.g., U.S. Pat. No. 5,478,925). In a specific example, the covalent associations are between the heterologous sequence contained in a Fc fusion protein of the invention (as described herein). In another specific example, covalent associations of fusion proteins of the invention are between heterologous polypeptide sequence from another protein that is capable of forming covalently associated multimers, such as for example, osteoprotegerin (see, e.g., International Publication NO: WO 98/49305, the contents of which are herein incorporated by reference in its entirety). In another embodiment, two or more polypeptides of the invention are joined through peptide linkers. Examples include those peptide linkers described in U.S. Pat. No. 5,073,627 (hereby incorporated by reference). Proteins comprising multiple polypeptides of the invention separated by peptide linkers may be produced using conventional recombinant DNA technology.

[0211] Another method for preparing multimer polypeptides of the invention involves use of polypeptides of the invention fused to a leucine zipper or isoleucine zipper polypeptide sequence. Leucine zipper and isoleucine zipper domains are polypeptides that promote multimerization of the proteins in which they are found. Leucine zippers were originally identified in several DNA-binding proteins (Landschulz et al., Science 240:1759, (1988)), and have since been found in a variety of different proteins. Among the known leucine zippers are naturally occurring peptides and derivatives thereof that dimerize or trimerize. Examples of leucine zipper domains suitable for producing soluble multimeric proteins of the invention are those described in PCT application WO 94/10308, hereby incorporated by reference. Recombinant fusion proteins comprising a polypeptide of the invention fused to a polypeptide sequence that dimerizes or trimerizes in solution are expressed in suitable host cells, and the resulting soluble multimeric fusion protein is recovered from the culture supernatant using techniques known in the art.

[0212] Trimeric polypeptides of the invention may offer the advantage of enhanced biological activity. Preferred leucine zipper moieties and isoleucine moieties are those that preferentially form trimers. One example is a leucine zipper derived from lung surfactant protein D (SPD), as described in Hoppe et al. (FEBS Letters 344:191, (1994)) and in U.S. patent application Ser. No. 08/446,922, hereby incorporated by reference. Other peptides derived from naturally occurring trimeric proteins may be employed in preparing trimeric polypeptides of the invention.

[0213] In another example, proteins of the invention are associated by interactions between Flag® polypeptide sequence contained in fusion proteins of the invention containing Flag®, polypeptide sequence. In a further embodiment, proteins of the invention are associated by interactions between heterologous polypeptide sequence contained in Flag® fusion proteins of the invention and anti-Flag® antibody.

[0214] The multimers of the invention may be generated using chemical techniques known in the art. For example, polypeptides desired to be contained in the multimers of the invention may be chemically cross-linked using linker molecules and linker molecule length optimization techniques known in the art (see, e.g., U.S. Pat. No. 5,478,925, which is herein incorporated by reference in its entirety). Additionally, multimers of the invention may be generated using techniques known in the art to form one or more inter-molecule cross-links between the cysteine residues located within the sequence of the polypeptides desired to be contained in the multimer (see, e.g., U.S. Pat. No. 5,478,925, which is herein incorporated by reference in its entirety). Further, polypeptides of the invention may be routinely modified by the addition of cysteine or biotin to the C-terminus or N-terminus of the polypeptide and techniques known in the art may be applied to generate multimers containing one or more of these modified polypeptides (see, e.g., U.S. Pat. No. 5,478,925, which is herein incorporated by reference in its entirety). Additionally, techniques known in the art may be applied to generate liposomes containing the polypeptide components desired to be contained in the multimer of the invention (see, e.g., U.S. Pat. No. 5,478,925, which is herein incorporated by reference in its entirety).

[0215] Alternatively, multimers of the invention may be generated using genetic engineering techniques known in the art. In one embodiment, polypeptides contained in multimers of the invention are produced recombinantly using fusion protein technology described herein or otherwise known in the art (see, e.g., U.S. Pat. No. 5,478,925, which is herein incorporated by reference in its entirety). In a specific embodiment, polynucleotides coding for a homodimer of the invention are generated by ligating a polynucleotide sequence encoding a polypeptide of the invention to a sequence encoding a linker polypeptide and then further to a synthetic polynucleotide encoding the translated product of the polypeptide in the reverse orientation from the original C-terminus to the N-terminus (lacking the leader sequence) (see, e.g., U.S. Pat. No. 5,478,925, which is herein incorporated by reference in its entirety). In another embodiment, recombinant techniques described herein or otherwise known in the art are applied to generate recombinant polypeptides of the invention which contain a transmembrane domain (or hydrophobic or signal peptide) and which can be incorporated by membrane reconstitution techniques into liposomes (see, e.g., U.S. Pat. No. 5,478,925, which is herein incorporated by reference in its entirety).

[0216] Antibodies

[0217] Further polypeptides of the invention relate to antibodies and T-cell antigen receptors (TCR) which immunospecifically bind a polypeptide, polypeptide fragment, or variant of the invention (e.g., a polypeptide or fragment or variant of the amino acid sequence of SEQ ID NO:Y or a polypeptide encoded by the cDNA contained in Clone ID No:Z, and/or an epitope, of the present invention) as determined by immunoassays well known in the art for assaying specific antibody-antigen binding. Antibodies of the invention include, but are not limited to, polyclonal, monoclonal, multispecific, human, humanized or chimeric antibodies, single chain antibodies, Fab fragments, F(ab′) fragments, fragments produced by a Fab expression library, anti-idiotypic (anti-Id) antibodies (including, e.g., anti-Id antibodies to antibodies of the invention), intracellularly-made antibodies (i.e., intrabodies), and epitope-binding fragments of any of the above. The term “antibody,” as used herein, refers to immunoglobulin molecules and immunologically active portions of immunoglobulin molecules, i.e., molecules that contain an antigen binding site that immunospecifically binds an antigen. The immunoglobulin molecules of the invention can be of any type (e.g., IgG, IgE, IgM, IgD, IgA and IgY), class (e.g., IgG1, IgG2, IgG3, IgG4, IgA1 and IgA2) or subclass of immunoglobulin molecule. In preferred embodiments, the immunoglobulin molecules of the invention are IgG1. In other preferred embodiments, the immunoglobulin molecules of the invention are IgG4.

[0218] Most preferably the antibodies are human antigen-binding antibody fragments of the present invention and include, but are not limited to, Fab, Fab′ and F(ab′)2, Fd, single-chain Fvs (scFv), single-chain antibodies, disulfide-linked Fvs (sdFv) and fragments comprising either a VL or VH domain. Antigen-binding antibody fragments, including single-chain antibodies, may comprise the variable region(s) alone or in combination with the entirety or a portion of the following: hinge region, CH1, CH2, and CH3 domains. Also included in the invention are antigen-binding fragments also comprising any combination of variable region(s) with a hinge region, CH1, CH2, and CH3 domains. The antibodies of the invention may be from any animal origin including birds and mammals. Preferably, the antibodies are human, murine (e.g., mouse and rat), donkey, ship rabbit, goat, guinea pig, camel, horse, or chicken. As used herein, “human” antibodies include antibodies having the amino acid sequence of a human immunoglobulin and include antibodies isolated from human immunoglobulin libraries or from animals transgenic for one or more human immunoglobulin and that do not express endogenous immunoglobulins, as described infra and, for example in, U.S. Pat. No. 5,939,598 by Kucherlapati et al.

[0219] The antibodies of the present invention may be monospecific, bispecific, trispecific or of greater multispecificity. Multispecific antibodies may be specific for different epitopes of a polypeptide of the present invention or may be specific for both a polypeptide of the present invention as well as for a heterologous epitope, such as a heterologous polypeptide or solid support material. See, e.g., PCT publications WO 93/17715; WO 92/08802; WO 91/00360; WO 92/05793; Tutt, et al., J. Immunol. 147:60-69 (1991); U.S. Pat. Nos. 4,474,893; 4,714,681; 4,925,648; 5,573,920; 5,601,819; Kostelny et al., J. Immunol. 148:1547-1553 (1992).

[0220] Antibodies of the present invention may be described or specified in terms of the epitope(s) or portion(s) of a polypeptide of the present invention which they recognize or specifically bind. The epitope(s) or polypeptide portion(s) may be specified as described herein, e.g., by N-terminal and C-terminal positions, or by size in contiguous amino acid residues, or listed in the Tables and Figures. Preferred epitopes of the invention include the predicted epitopes shown in column 7 of Table 1A, as well as polynucleotides that encode these epitopes. Antibodies which specifically bind any epitope or polypeptide of the present invention may also be excluded. Therefore, the present invention includes antibodies that specifically bind polypeptides of the present invention, and allows for the exclusion of the same.

[0221] Antibodies of the present invention may also be described or specified in terms of their cross-reactivity. Antibodies that do not bind any other analog, ortholog, or homolog of a polypeptide of the present invention are included. Antibodies that bind polypeptides with at least 95%, at least 90%, at least 85%, at least 80%, at least 75%, at least 70%, at least 65%, at least 60%, at least 55%, and at least 50% identity (as calculated using methods known in the art and described herein) to a polypeptide of the present invention are also included in the present invention. In specific embodiments, antibodies of the present invention cross-react with murine, rat and/or rabbit homologs of human proteins and the corresponding epitopes thereof. Antibodies that do not bind polypeptides with less than 95%, less than 90%, less than 85%, less than 80%, less than 75%, less than 70%, less than 65%, less than 60%, less than 55%, and less than 50% identity (as calculated using methods known in the art and described herein) to a polypeptide of the present invention are also included in the present invention. In a specific embodiment, the above-described cross-reactivity is with respect to any single specific antigenic or immunogenic polypeptide, or combination(s) of 2, 3, 4, 5, or more of the specific antigenic and/or immunogenic polypeptides disclosed herein. Further included in the present invention are antibodies which bind polypeptides encoded by polynucleotides which hybridize to a polynucleotide of the present invention under stringent hybridization conditions (as described herein). Antibodies of the present invention may also be described or specified in terms of their binding affinity to a polypeptide of the invention. Preferred binding affinities include those with a dissociation constant or Kd less than 5×10⁻² M, 10⁻² M, 5×10⁻³ M, 10⁻³ M, 5×10⁻⁴ M, 10⁻⁴ M, 5×10⁻⁵ M, 10⁻⁵ M, 5×10⁻⁶ M, 10⁻⁶ M, 5×10⁻⁷ M, 10⁷ M, 5×10⁻⁸ M, 10⁻⁸ M, 5×10⁻⁹ M, 10⁻⁹ M, 5×10⁻¹⁰ M, 10⁻¹⁰ M, 5×10⁻¹¹ M, 10⁻¹¹ M, 5×10⁻¹² M, 10⁻¹² M, 5×10⁻¹³ M, 10⁻¹³ M, 5×10⁻¹⁴ M, 10⁻¹⁴ M, 5×10⁻¹⁵ M, or 10⁻¹⁵ M.

[0222] The invention also provides antibodies that competitively inhibit binding of an antibody to an epitope of the invention as determined by any method known in the art for determining competitive binding, for example, the immunoassays described herein. In preferred embodiments, the antibody competitively inhibits binding to the epitope by at least 95%, at least 90%, at least 85 %, at least 80%, at least 75%, at least 70%, at least 60%, or at least 50%.

[0223] Antibodies of the present invention may act as agonists or antagonists of the polypeptides of the present invention. For example, the present invention includes antibodies which disrupt the receptor/ligand interactions with the polypeptides of the invention either partially or fully. Preferably, antibodies of the present invention bind an antigenic epitope disclosed herein, or a portion thereof. The invention features both receptor-specific antibodies and ligand-specific antibodies. The invention also features receptor-specific antibodies which do not prevent ligand binding but prevent receptor activation. Receptor activation (i.e., signaling) may be determined by techniques described herein or otherwise known in the art. For example, receptor activation can be determined by detecting the phosphorylation (e.g., tyrosine or serine/threonine) of the receptor or its substrate by immunoprecipitation followed by western blot analysis (for example, as described supra). In specific embodiments, antibodies are provided that inhibit ligand activity or receptor activity by at least 95%, at least 90%, at least 85%, at least 80%, at least 75%, at least 70%, at least 60%, or at least 50% of the activity in absence of the antibody.

[0224] The invention also features receptor-specific antibodies which both prevent ligand binding and receptor activation as well as antibodies that recognize the receptor-ligand complex, and, preferably, do not specifically recognize the unbound receptor or the unbound ligand. Likewise, included in the invention are neutralizing antibodies which bind the ligand and prevent binding of the ligand to the receptor, as well as antibodies which bind the ligand, thereby preventing receptor activation, but do not prevent the ligand from binding the receptor. Further included in the invention are antibodies which activate the receptor. These antibodies may act as receptor agonists, i.e., potentiate or activate either all or a subset of the biological activities of the ligand-mediated receptor activation, for example, by inducing dimerization of the receptor. The antibodies may be specified as agonists, antagonists or inverse agonists for biological activities comprising the specific biological activities of the peptides of the invention disclosed herein. The above antibody agonists can be made using methods known in the art. See, e.g., PCT publication WO 96/40281; U.S. Pat. No. 5,811,097; Deng et al., Blood 92(6):1981-1988 (1998); Chen et al., Cancer Res. 58(16):3668-3678 (1998); Harrop et al., J. Immunol. 161(4):1786-1794 (1998); Zhu et al., Cancer Res. 58(15):3209-3214 (1998); Yoon et al., J. Immunol. 160(7):3170-3179 (1998); Prat et al., J. Cell. Sci. 111(Pt2):237-247 (1998); Pitard et al., J. Immunol. Methods 205(2):177-190 (1997); Liautard et al., Cytokine 9(4):233-241 (1997); Carlson et al., J. Biol. Chem. 272(17):11295-11301 (1997); Taryman et al., Neuron 14(4):755-762 (1995); Muller et al., Structure 6(9):1153-1167 (1998); Bartunek et al., Cytokine 8(1):14-20 (1996) (which are all incorporated by reference herein in their entireties).

[0225] Antibodies of the present invention may be used, for example, to purify, detect, and target the polypeptides of the present invention, including both in vitro and in vivo diagnostic and therapeutic methods. For example, the antibodies have utility in immunoassays for qualitatively and quantitatively measuring levels, of the polypeptides of the present invention in biological samples. See, e.g., Harlow et al., Antibodies: A Laboratory Manual, (Cold Spring Harbor Laboratory Press, 2nd ed. 1988); incorporated by reference herein in its entirety.

[0226] As discussed in more detail below, the antibodies of the present invention may be used either alone or in combination with other compositions. The antibodies may further be recombinantly fused to a heterologous polypeptide at the N- or C-terminus or chemically conjugated (including covalent and non-covalent conjugations) to polypeptides or other compositions. For example, antibodies of the present invention may be recombinantly fused or conjugated to molecules useful as labels in detection assays and effector molecules such as heterologous polypeptides, drugs, radionuclides, or toxins. See, e.g., PCT publications WO 92/08495; WO 91/14438; WO 89/12624; U.S. Pat. No. 5,314,995; and EP 396,387; the disclosures of which are incorporated herein by reference in their entireties.

[0227] The antibodies of the invention include derivatives that are modified, i.e, by the covalent attachment of any type of molecule to the antibody such that covalent attachment does not prevent the antibody from generating an anti-idiotypic response. For example, but not by way of limitation, the antibody derivatives include antibodies that have been modified, e.g., by glycosylation, acetylation, pegylation, phosphylation, amidation, derivatization by known protecting/blocking groups, proteolytic cleavage, linkage to a cellular ligand or other protein, etc. Any of numerous chemical modifications may be carried out by known techniques, including, but not limited to specific chemical cleavage, acetylation, formylation, metabolic synthesis of tunicamycin, etc. Additionally, the derivative may contain one or more non-classical amino acids.

[0228] The antibodies of the present invention may be generated by any suitable method known in the art. Polyclonal antibodies to an antigen-of- interest can be produced by various procedures well known in the art. For example, a polypeptide of the invention can be administered to various host animals including, but not limited to, rabbits, mice, rats, etc. to induce the production of sera containing polyclonal antibodies specific for the antigen. Various adjuvants may be used to increase the immunological response, depending on the host species, and include but are not limited to, Freund's (complete and incomplete), mineral gels such as aluminum hydroxide, surface active substances such as lysolecithin, pluronic polyols, polyanions, peptides, oil emulsions, keyhole limpet hemocyanins, dinitrophenol, and potentially useful human adjuvants such as BCG (bacille Calmette-Guerin) and corynebacterium parvum. Such adjuvants are also well known in the art.

[0229] Monoclonal antibodies can be prepared using a wide variety of techniques known in the art including the use of hybridoma, recombinant, and phage display technologies, or a combination thereof. For example, monoclonal antibodies can be produced using hybridoma techniques including those known in the art and taught, for example, in Harlow et al., Antibodies: A Laboratory Manual, (Cold Spring Harbor Laboratory Press, 2nd ed. 1988); Hammerling, et al., in: Monoclonal Antibodies and T-CeLl Hybridomas 563-681 (Elsevier, N.Y., 1981) (said references incorporated by reference in their entireties). The term “monoclonal antibody” as used herein is not limited to antibodies produced through hybridoma technology. The term “monoclonal antibody” refers to an antibody that is derived from a single clone, including any eukaryotic, prokaryotic, or phage clone, and not the method by which it is produced.

[0230] Methods for producing and screening for specific antibodies using hybridoma technology are routine and well known in the art and are discussed in detail in the Examples. In a non-limiting example, mice can be immunized with a polypeptide of the invention or a cell expressing such peptide. Once an immune response is detected, e.g., antibodies specific for the antigen are detected in the mouse serum, the mouse spleen is harvested and splenocytes isolated. The splenocytes are then fused by well known techniques to any suitable myeloma cells, for example cells from cell line SP20 available from the ATCC. Hybridomas are selected and cloned by limited dilution. The hybridoma clones are then assayed by methods known in the art for cells that secrete antibodies capable of binding a polypeptide of the invention. Ascites fluid, which generally contains high levels of antibodies, can be generated by immunizing mice with positive hybridoma clones.

[0231] Accordingly, the present invention provides methods of generating monoclonal antibodies as well as antibodies produced by the method comprising culturing a hybridoma cell secreting an antibody of the invention wherein, preferably, the hybridoma is generated by fusing splenocytes isolated from a mouse immunized with an antigen of the invention with myeloma cells and then screening the hybridomas resulting from the fusion for hybridoma clones that secrete an antibody able to bind a polypeptide of the invention.

[0232] Another well known method for producing both polyclonal and monoclonal human B cell lines is transformation using Epstein Barr Virus (EBV). Protocols for generating EBV-transformed B cell lines are commonly known in the art, such as, for example, the protocol outlined in Chapter 7.22 of Current Protocols in Immunology, Coligan et al., Eds., 1994, John Wiley & Sons, NY, which is hereby incorporated in its entirety by reference. The source of B cells for transformation is commonly human peripheral blood, but B cells for transformation may also be derived from other sources including, but not limited to, lymph nodes, tonsil, spleen, tumor tissue, and infected tissues. Tissues are generally made into single cell suspensions prior to EBV transformation. Additionally, steps may be taken to either physically remove or inactivate T cells (e.g., by treatment with cyclosporin A) in B cell-containing samples, because T cells from individuals seropositive for anti-EBV antibodies can suppress B cell immortalization by EBV.

[0233] In general, the sample containing human B cells is innoculated with EBV, and cultured for 3-4 weeks. A typical source of EBV is the culture supernatant of the B95-8 cell line (ATCC #VR-1492). Physical signs of EBV transformation can generally be seen towards the end of the 3-4 week culture period. By phase-contrast microscopy, transformed cells may appear large, clear, hairy and tend to aggregate in tight clusters of cells. Initially, EBV lines are generally polyclonal. However, over prolonged periods of cell cultures, EBV lines may become monoclonal or polyclonal as a result of the selective outgrowth of particular B cell clones. Alternatively, polyclonal EBV transformed lines may be subcloned (e.g., by limiting dilution culture) or fused with a suitable fusion partner and plated at limiting dilution to obtain monoclonal B cell lines. Suitable fusion partners for EBV transformed cell lines include mouse myeloma cell lines (e.g., SP2/0, X63-Ag8.653), heteromyeloma cell lines (human x mouse; e.g, SPAM-8, SBC-H20, and CB-F7), and human cell lines (e.g., GM 1500, SKO-007, RPMI 8226, and KR-4). Thus, the present invention also provides a method of generating polyclonal or monoclonal human antibodies against polypeptides of the invention or fragments thereof, comprising EBV-transformation of human B cells.

[0234] Antibody fragments which recognize specific epitopes may be generated by known techniques. For example, Fab and F(ab′)2 fragments of the invention may be produced by proteolytic cleavage of immunoglobulin molecules, using enzymes such as papain (to produce Fab fragments) or pepsin (to produce F(ab′)2 fragments). F(ab′)2 fragments contain the variable region, the light chain constant region and the CH1 domain of the heavy chain.

[0235] For example, the antibodies of the present invention can also be generated using various phage display methods known in the art. In phage display methods, functional antibody domains are displayed on the surface of phage particles which carry the polynucleotide sequences encoding them. In a particular embodiment, such phage can be utilized to display antigen binding domains expressed from a repertoire or combinatorial antibody library (e.g., human or murine). Phage expressing an antigen binding domain that binds the antigen of interest can be selected or identified with antigen, e.g., using labeled antigen or antigen bound or captured to a solid surface or bead. Phage used in these methods are typically filamentous phage including fd and M13 binding domains expressed from phage with Fab, Fv or disulfide stabilized Fv antibody domains recombinantly fused to either the phage gene III or gene VIII protein. Examples of phage display methods that can be used to make the antibodies of the present invention include those disclosed in Brinkman et al., J. Immunol. Methods 182:41-50 (1995); Ames et al., J. Immunol. Methods 184:177-186 (1995); Kettleborough et al., Eur. J. Immunol. 24:952-958 (1994); Persic et al., Gene 187 9-18 (1997); Burton et al., Advances in Immunology 57:191-280 (1994); PCT application No. PCT/GB91/01134; PCT publications WO 90/02809; WO 91/10737; WO 92/01047; WO 92/18619; WO 93/11236; WO 95/15982; WO 95/20401; and U.S. Pat. Nos. 5,698,426; 5,223,409; 5,403,484; 5,580,717; 5,427,908, 5,750,753; 5,821,047; 5,571,698; 5,427,908; 5,516,637; 5,780,225; 5,658,727; 5,733,743 and 5,969,108; each of which is incorporated herein by reference in its entirety.

[0236] As described in the above references, after phage selection, the antibody coding regions from the phage can be isolated and used to generate whole antibodies, including human antibodies, or any other desired antigen binding fragment, and expressed in any desired host, including mammalian cells, insect cells, plant cells, yeast, and bacteria, e.g., as described in detail below. For example, techniques to recombinantly produce Fab, Fab′ and F(ab′)2 fragments can also be employed using methods known in the art such as those disclosed in PCT publication WO 92/22324; Mullinax et al., BioTechniques 12(6):864-869 (1992); and Sawai et al., AJRI 34:26-34 (1995); and Better et al., Science 240:1041-1043 (1988) (said references incorporated by reference in their entireties).

[0237] Examples of techniques which can be used to produce single-chain Fvs and antibodies include those described in U.S. Pat. Nos. 4,946,778 and 5,258,498; Huston et al., Methods in Enzymology 203:46-88 (1991); Shu et al., PNAS 90:7995-7999 (1993); and Skerra et al., Science 240:1038-1040 (1988). For some uses, including in vivo use of antibodies in humans and in vitro detection assays, it may be preferable to use chimeric, humanized, or human antibodies. A chimeric antibody is a molecule in which different portions of the antibody are derived from different animal species, such as antibodies having a variable region derived from a murine monoclonal antibody and a human immunoglobulin constant region. Methods for producing chimeric antibodies are known in the art. See e.g., Morrison, Science 229:1202 (1985); Oi et al., BioTechniques 4:214 (1986); Gillies et al., (1989) J. Immunol. Methods 125:191-202; U.S. Pat. Nos. 5,807,715; 4,816,567; and 4,816397, which are incorporated herein by reference in their entirety. Humanized antibodies are antibody molecules from non-human species antibody that binds the desired antigen having one or more complementarity determining regions (CDRs) from the non-human species and a framework regions from a human immunoglobulin molecule. Often, framework residues in the human framework regions will be substituted with the corresponding residue from the CDR donor antibody to alter, preferably improve, antigen binding. These framework substitutions are identified by methods well known in the art, e.g., by modeling of the interactions of the CDR and framework residues to identify framework residues important for antigen binding and sequence comparison to identify unusual framework residues at particular positions. (See, e.g., Queen et al., U.S. Pat. No. 5,585,089; Riechmann et al., Nature 332:323 (1988), which are incorporated herein by reference in their entireties.) Antibodies can be humanized using a variety of techniques known in the art including, for example, CDR-grafting (EP 239,400; PCT publication WO 91/09967; U.S. Pat. Nos. 5,225,539; 5,530,101; and 5,585,089), veneering or resurfacing (EP 592,106; EP 519,596; Padlan, Molecular Immunology 28(4/5):489-498 (1991); Studnicka et al., Protein Engineering 7(6):805-814 (1994); Roguska. et al., PNAS 91:969-973 (1994)), and chain shuffling (U.S. Pat. No. 5,565,332).

[0238] Completely human antibodies are particularly desirable for therapeutic treatment of human patients. Human antibodies can be made by a variety of methods known in the art including phage display methods described above using antibody libraries derived from human immunoglobulin sequences. See also, U.S. Pat. Nos. 4,444,887 and 4,716,111; and PCT publications WO 98/46645, WO 98/50433, WO 98/24893, WO 98/16654, WO 96/34096, WO 96/33735, and WO 91/10741; each of which is incorporated herein by reference in its entirety.

[0239] Human antibodies can also be produced using transgenic mice which are incapable of expressing functional endogenous immunoglobulins, but which can express human immunoglobulin genes. For example, the human heavy and light chain immunoglobulin gene complexes may be introduced randomly or by homologous recombination into mouse embryonic stem cells. Alternatively, the human variable region, constant region, and diversity region may be introduced into mouse embryonic stem cells in addition to the human heavy and light chain genes. The mouse heavy and light chain immunoglobulin genes may be rendered non-functional separately or simultaneously with the introduction of human immunoglobulin loci by homologous recombination. In particular, homozygous deletion of the JH region prevents endogenous antibody production. The modified embryonic stem cells are expanded and microinjected into blastocysts to produce chimeric mice. The chimeric mice are then bred to produce homozygous offspring which express human antibodies. The transgenic mice are immunized in the normal fashion with a selected antigen, e.g., all or a portion of a polypeptide of the invention. Monoclonal antibodies directed against the antigen can be obtained from the immunized, transgenic mice using conventional hybridoma technology. The human immunoglobulin transgenes harbored by the transgenic mice rearrange during B cell differentiation, and subsequently undergo class switching and somatic mutation. Thus, using such a technique, it is possible to produce therapeutically useful IgG, IgA, IgM and IgE antibodies. For an overview of this technology for producing human antibodies, see Lonberg and Huszar, Int. Rev. Immunol. 13:65-93 (1995). For a detailed discussion of this technology for producing human antibodies and human monoclonal antibodies and protocols for producing such antibodies, see, e.g., PCT publications WO 98/24893; WO 92/01047; WO 96/34096; WO 96/33735; European Patent No. 0 598 877; U.S. Pat. Nos. 5,413,923; 5,625,126; 5,633,425; 5,569,825; 5,661,016; 5,545,806; 5,814,318; 5,885,793; 5,916,771; 5,939,598; 6,075,181; and 6,114,598, which are incorporated by reference herein in their entirety. In addition, companies such as Abgenix, Inc. (Freemont, Calif.) and Genpharm (San Jose, Calif.) can be engaged to provide human antibodies directed against a selected antigen using technology similar to that described above.

[0240] Completely human antibodies which recognize a selected epitope can be generated using a technique referred to as “guided selection.” In this approach a selected non-human monoclonal antibody, e.g., a mouse antibody, is used to guide the selection of a completely human antibody recognizing the same epitope. (Jespers et al., Bio/technology 12:899-903 (1988)).

[0241] Further, antibodies to the polypeptides of the invention can, in turn, be utilized to generate anti-idiotype antibodies that “mimic” polypeptides of the invention using techniques well known to those skilled in the art. (See, e.g., Greenspan & Bona, FASEB J. 7(5):437-444; (1989) and Nissinoff, J. Immunol. 147(8):2429-2438 (1991)). For example, antibodies which bind to and competitively inhibit polypeptide multimerization and/or binding of a polypeptide of the invention to a ligand can be used to generate anti-idiotypes that “mimic” the polypeptide multimerization and/or binding domain and, as a consequence, bind to and neutralize polypeptide and/or its ligand. Such neutralizing anti-idiotypes or Fab fragments of such anti-idiotypes can be used in therapeutic regimens to neutralize polypeptide ligand(s)/receptor(s). For example, such anti-idiotypic antibodies can be used to bind a polypeptide of the invention and/or to bind its ligand(s)/receptor(s), and thereby block its biological activity. Alternatively, antibodies which bind to and enhance polypeptide multimerization and/or binding, and/or receptor/ligand multimerization, binding and/or signaling can be used to generate anti-idiotypes that function as agonists of a polypeptide of the invention and/or its ligand/receptor. Such agonistic anti-idiotypes or Fab fragments of such anti-idiotypes can be used in therapeutic regimens as agonists of the polypeptides of the invention or its ligand(s)/receptor(s). For example, such anti-idiotypic antibodies can be used to bind a polypeptide of the invention and/or to bind its ligand(s)/receptor(s), and thereby promote or enhance its biological activity.

[0242] Intrabodies of the invention can be produced using methods known in the art, such as those disclosed and reviewed in Chen et al., Hum. Gene Ther. 5:595-601 (1994); Marasco, W. A., Gene Ther. 4:11-15 (1997); Rondon and Marasco, Annu. Rev. Microbiol. 51:257-283 (1997); Proba et al., J. Mol. Biol. 275:245-253 (1998); Cohen et al., Oncogene 17:2445-2456 (1998); Ohage and Steipe, J. Mol. Biol. 291:1119-1128 (1999); Ohage et al., J. Mol. Biol. 291:1129-1134 (1999); Wirtz and Steipe, Protein Sci. 8:2245-2250 (1999); Zhu et al., J. Immunol. Methods 231:207-222 (1999); and references cited therein.

[0243] Polynucleotides Encoding Antibodies

[0244] The invention further provides polynucleotides comprising a nucleotide sequence encoding an antibody of the invention and fragments thereof. The invention also encompasses polynucleotides that hybridize under stringent or alternatively, under lower stringency hybridization conditions, e.g., as defined supra, to polynucleotides that encode an antibody, preferably, that specifically binds to a polypeptide of the invention, preferably, an antibody that binds to a polypeptide having the amino acid sequence of SEQ ID NO:Y, to a polypeptide encoded by a portion of SEQ ID NO:X as defined in columns 8 and 9 of Table 2, and/or to a polypeptide encoded by the cDNA contained in Clone ID NO:Z.

[0245] The polynucleotides may be obtained, and the nucleotide sequence of the polynucleotides determined, by any method known in the art. For example, if the nucleotide sequence of the antibody is known, a polynucleotide encoding the antibody may be assembled from chemically synthesized oligonucleotides (e.g., as described in Kutmeier et al., BioTechniques 17:242 (1994)), which, briefly, involves the synthesis of overlapping oligonucleotides containing portions of the sequence encoding the antibody, annealing and ligating of those oligonucleotides, and then amplification of the ligated oligonucleotides by PCR.

[0246] Alternatively, a polynucleotide encoding an antibody may be generated from nucleic acid from a suitable source. If a clone containing a nucleic acid encoding a particular antibody is not available, but the sequence of the antibody molecule is known, a nucleic acid encoding the immunoglobulin may be chemically synthesized or obtained from a suitable source (e.g., an antibody cDNA library, or a cDNA library generated from, or nucleic acid, preferably poly A+ RNA, isolated from, any tissue or cells expressing the antibody, such as hybridoma cells selected to express an antibody of the invention) by PCR amplification using synthetic primers hybridizable to the 3′ and 5′ ends of the sequence or by cloning using an oligonucleotide probe specific for the particular gene sequence to identify, e.g., a cDNA clone from a cDNA library that encodes the antibody. Amplified nucleic acids generated by PCR may then be cloned into replicable cloning vectors using any method well known in the art.

[0247] Once the nucleotide sequence and corresponding amino acid sequence of the antibody is determined, the nucleotide sequence of the antibody may be manipulated using methods well known in the art for the manipulation of nucleotide sequences, e.g., recombinant DNA techniques, site directed mutagenesis, PCR, etc. (see, for example, the techniques described in Sambrook et al., 1990, Molecular Cloning, A Laboratory Manual, 2d Ed., Cold Spring Harbor Laboratory, Cold Spring Harbor, N.Y. and Ausubel et al., eds., 1998, Current Protocols in Molecular Biology, John Wiley & Sons, NY, which are both incorporated by reference herein in their entireties), to generate antibodies having a different amino acid sequence, for example to create amino acid substitutions, deletions, and/or insertions.

[0248] In a specific embodiment, the amino acid sequence of the heavy and/or light chain variable domains may be inspected to identify the sequences of the complementarity determining regions (CDRs) by methods that are well know in the art, e.g., by comparison to known amino acid sequences of other heavy and light chain variable regions to determine the regions of sequence hypervariability. Using routine recombinant DNA techniques, one or more of the CDRs may be inserted within framework regions, e.g., into human framework regions to humanize a non-human antibody, as described supra. The framework regions may be naturally occurring or consensus framework regions, and preferably human framework regions (see, e.g., Chothia et al., J. Mol. Biol. 278: 457-479 (1998) for a listing of human framework regions). Preferably, the polynucleotide generated by the combination of the framework regions and CDRs encodes an antibody that specifically binds a polypeptide of the invention. Preferably, as discussed supra, one or more amino acid substitutions may be made within the framework regions, and, preferably, the amino acid substitutions improve binding of the antibody to its antigen. Additionally, such methods may be used to make amino acid substitutions or deletions of one or more variable region cysteine residues participating in an intrachain disulfide bond to generate antibody molecules lacking one or more intrachain disulfide bonds. Other alterations to the polynucleotide are encompassed by the present invention and within the skill of the art.

[0249] In addition, techniques developed for the production of “chimeric antibodies” (Morrison et al., Proc. Natl. Acad. Sci. 81:851-855 (1984); Neuberger et al., Nature 312:604-608 (1984); Takeda et al., Nature 314:452-454 (1985)) by splicing genes from a mouse antibody molecule of appropriate antigen specificity together with genes from a human antibody molecule of appropriate biological activity can be used. As described supra, a chimeric antibody is a molecule in which different portions are derived from different animal species, such as those having a variable region derived from a murine mAb and a human immunoglobulin constant region, e.g., humanized antibodies.

[0250] Alternatively, techniques described for the production of single chain antibodies (U.S. Pat. No. 4,946,778; Bird, Science 242:423-42 (1988); Huston et al., Proc. Natl. Acad. Sci. USA 85:5879-5883 (1988); and Ward et al., Nature 334:544-54 (1989)) can be adapted to produce single chain antibodies. Single chain antibodies are formed by linking the heavy and light chain fragments of the Fv region via an amino acid bridge, resulting in a single chain polypeptide. Techniques for the assembly of functional Fv fragments in E. coli may also be used (Skerra et al., Science 242:1038-1041 (1988)).

[0251] Methods of Producing Antibodies

[0252] The antibodies of the invention can be produced by any method known in the art for the synthesis of antibodies, in particular, by chemical synthesis or preferably, by recombinant expression techniques. Methods of producing antibodies include, but are not limited to, hybridoma technology, EBV transformation, and other methods discussed herein as well as through the use recombinant DNA technology, as discussed below.

[0253] Recombinant expression of an antibody of the invention, or fragment, derivative or analog thereof, (e.g., a heavy or light chain of an antibody of the invention or a single chain antibody of the invention), requires construction of an expression vector containing a polynucleotide that encodes the antibody. Once a polynucleotide encoding an antibody molecule or a heavy or light chain of an antibody, or portion thereof (preferably containing the heavy or light chain variable domain), of the invention has been obtained, the vector for the production of the antibody molecule may be produced by recombinant DNA technology using techniques well known in the art. Thus, methods for preparing a protein by expressing a polynucleotide containing an antibody encoding nucleotide sequence are described herein. Methods which are well known to those skilled in the art can be used to construct expression vectors containing antibody coding sequences and appropriate transcriptional and translational control signals. These methods include, for example, in vitro recombinant DNA techniques, synthetic techniques, and in vivo genetic recombination. The invention, thus, provides replicable vectors comprising a nucleotide sequence encoding an antibody molecule of the invention, or a heavy or light chain thereof, or a heavy or light chain variable domain, operably linked to a promoter. Such vectors may include the nucleotide sequence encoding the constant region of the antibody molecule (see, e.g., PCT Publication WO 86/05807; PCT Publication WO 89/01036; and U.S. Pat. No. 5,122,464) and the variable domain of the antibody may be cloned into such a vector for expression of the entire heavy or light chain.

[0254] The expression vector is transferred to a host cell by conventional techniques and the transfected cells are then cultured by conventional techniques to produce an antibody of the invention. Thus, the invention includes host cells containing a polynucleotide encoding an antibody of the invention, or a heavy or light chain thereof, or a single chain antibody of the invention, operably linked to a heterologous promoter. In preferred embodiments for the expression of double-chained antibodies, vectors encoding both the heavy and light chains may be co-expressed in the host cell for expression of the entire immunoglobulin molecule, as detailed below.

[0255] A variety of host-expression vector systems may be utilized to express the antibody molecules of the invention. Such host-expression systems represent vehicles by which the coding sequences of interest may be produced and subsequently purified, but also represent cells which may, when transformed or transfected with the appropriate nucleotide coding sequences, express an antibody molecule of the invention in situ. These include but are not limited to microorganisms such as bacteria (e.g., E. coli, B. subtilis) transformed with recombinant bacteriophage DNA, plasmid DNA or cosmid DNA expression vectors containing antibody coding sequences; yeast (e.g., Saccharomyces, Pichia) transformed with recombinant yeast expression vectors containing antibody coding sequences; insect cell systems infected with recombinant virus expression vectors (e.g., baculovirus) containing antibody coding sequences; plant cell systems infected with recombinant virus expression vectors (e.g., cauliflower mosaic virus, CaMV; tobacco mosaic virus, TMV) or transformed with recombinant plasmid expression vectors (e.g., Ti plasmid) containing antibody coding sequences; or mammalian cell systems (e.g., COS, CHO, BHK, 293, 3T3 cells) harboring recombinant expression constructs containing promoters derived from the genome of mammalian cells (e.g., metallothionein promoter) or from mammalian viruses (e.g., the adenovirus late promoter; the vaccinia virus 7.5K promoter). Preferably, bacterial cells such as Escherichia coli, and more preferably, eukaryotic cells, especially for the expression of whole recombinant antibody molecule, are used for the expression of a recombinant antibody molecule. For example, mammalian cells such as Chinese hamster ovary cells (CHO), in conjunction with a vector such as the major intermediate early gene promoter element from human cytomegalovirus is an effective expression system for antibodies (Foecking et al., Gene 45:101 (1986); Cockett et al., Bio/Technology 8:2 (1990)).

[0256] In bacterial systems, a number of expression vectors may be advantageously selected depending upon the use intended for the antibody molecule being expressed. For example, when a large quantity of such a protein is to be produced, for the generation of pharmaceutical compositions of an antibody molecule, vectors which direct the expression of high levels of fusion protein products that are readily purified may be desirable. Such vectors include, but are not limited, to the E. coli expression vector pUR278 (Ruther et al., EMBO J. 2:1791 (1983)), in which the antibody coding sequence may be ligated individually into the vector in frame with the lac Z coding region so that a fusion protein is produced; pIN vectors (Inouye & Inouye, Nucleic Acids Res. 13:3101-3109 (1985); Van Heeke & Schuster, J. Biol. Chem. 24:5503-5509 (1989)); and the like. pGEX vectors may also be used to express foreign polypeptides as fusion proteins with glutathione S-transferase (GST). In general, such fusion proteins are soluble and can easily be purified from lysed cells by adsorption and binding to matrix glutathione-agarose beads followed by elution in the presence of free glutathione. The pGEX vectors are designed to include thrombin or factor Xa protease cleavage sites so that the cloned target gene product can be released from the GST moiety.

[0257] In an insect system, Autographa californica nuclear polyhedrosis virus (AcNPV) is used as a vector to express foreign genes. The virus grows in Spodoptera frugiperda cells. The antibody coding sequence may be cloned individually into non-essential regions (for example the polyhedrin gene) of the virus and placed under control of an AcNPV promoter (for example the polyhedrin promoter).

[0258] In mammalian host cells, a number of viral-based expression systems may be utilized. In cases where an adenovirus is used as an expression vector, the antibody coding sequence of interest may be ligated to an adenovirus transcription/translation control complex, e.g., the late promoter and tripartite leader sequence. This chimeric gene may then be inserted in the adenovirus genome by in vitro or in vivo recombination. Insertion in a non-essential region of the viral genome (e.g., region E1 or E3) will result in a recombinant virus that is viable and capable of expressing the antibody molecule in infected hosts. (e.g., see Logan & Shenk, Proc. Natl. Acad. Sci. USA 81:355-359 (1984)). Specific initiation signals may also be required for efficient translation of inserted antibody coding sequences. These signals include the ATG initiation codon and adjacent sequences. Furthermore, the initiation codon must be in phase with the reading frame of the desired coding sequence to ensure translation of the entire insert. These exogenous translational control signals and initiation codons can be of a variety of origins, both natural and synthetic. The efficiency of expression may be enhanced by the inclusion of appropriate transcription enhancer elements, transcription terminators, etc. (see Bittner et al., Methods in Enzymol. 153:51-544 (1987)).

[0259] In addition, a host cell strain may be chosen which modulates the expression of the inserted sequences, or modifies and processes the gene product in the specific fashion desired. Such modifications (e.g., glycosylation) and processing (e.g., cleavage) of protein products may be important for the function of the protein. Different host cells have characteristic and specific mechanisms for the post-translational processing and modification of proteins and gene products. Appropriate cell lines or host systems can be chosen to ensure the correct modification and processing of the foreign protein expressed. To this end, eukaryotic host cells which possess the cellular machinery for proper processing of the primary transcript, glycosylation, and phosphorylation of the gene product may be used. Such mammalian host cells include but are not limited to CHO, VERY, BHK, Hela, COS, MDCK, 293, 3T3, W138, and in particular, breast cancer cell lines such as, for example, BT483, Hs578T, HTB2, BT20 and T47D, and normal mammary gland cell line such as, for example, CRL7030 and Hs578Bst.

[0260] For long-term, high-yield production of recombinant proteins, stable expression is preferred. For example, cell lines which stably express the antibody molecule may be engineered. Rather than using expression vectors which contain viral origins of replication, host cells can be transformed with DNA controlled by appropriate expression control elements (e.g., promoter, enhancer, sequences, transcription terminators, polyadenylation sites, etc.), and a selectable marker. Following the introduction of the foreign DNA, engineered cells may be allowed to grow for 1-2 days in an enriched media, and then are switched to a selective media. The selectable marker in the recombinant plasmid confers resistance to the selection and allows cells to stably integrate the plasmid into their chromosomes and grow to form foci which in turn can be cloned and expanded into cell lines. This method may advantageously be used to engineer cell lines which express the antibody molecule. Such engineered cell lines may be particularly useful in screening and evaluation of compounds that interact directly or indirectly with the antibody molecule.

[0261] A number of selection systems may be used, including but not limited to the herpes simplex virus thymidine kinase (Wigler et al., Cell 11:223 (1977)), hypoxanthine-guanine phosphoribosyltransferase (Szybalska & Szybalski, Proc. Natl. Acad. Sci. USA 48:202 (1992)), and adenine phosphoribosyltransferase (Lowy et al., Cell 22:817 (1980)) genes can be employed in tk-, hgprt- or aprt-cells, respectively. Also, antimetabolite resistance can be used as the basis of selection for the following genes: dhfr, which confers resistance to methotrexate (Wigler et al., Natl. Acad. Sci. USA 77:357 (1980); O'Hare et al., Proc. Natl. Acad. Sci. USA 78:1527 (1981)); gpt, which confers resistance to mycophenolic acid (Mulligan & Berg, Proc. Natl. Acad. Sci. USA 78:2072 (1981)); neo, which confers resistance to the aminoglycoside G-418 Clinical Pharmacy 12:488-505; Wu and Wu, Biotherapy 3:87-95 (1991); Tolstoshev, Ann. Rev. Pharmacol. Toxicol. 32:573-596 (1993); Mulligan, Science 260:926-932 (1993); and Morgan and Anderson, Ann. Rev. Biochem. 62:191-217 (1993); May, 1993, TIB TECH 11(5):155-215 (1993)); and hygro, which confers resistance to hygromycin (Santerre et al., Gene 30:147 (1984)). Methods commonly known in the art of recombinant DNA technology may be routinely applied to select the desired recombinant clone, and such methods are described, for example, in Ausubel et al. (eds.), Current Protocols in Molecular Biology, John Wiley & Sons, NY (1993); Kriegler, Gene Transfer and Expression, A Laboratory Manual, Stockton Press, NY (1990); and in Chapters 12 and 13, Dracopoli et al. (eds), Current Protocols in Human Genetics, John Wiley & Sons, NY (1994); Colberre-Garapin et al., J. Mol. Biol. 150:1 (1981), which are incorporated by reference herein in their entireties.

[0262] The expression levels of an antibody molecule can be increased by vector amplification (for a review, see Bebbington and Hentschel, The use of vectors based on gene amplification for the expression of cloned genes in mammalian cells in DNA cloning, Vol.3. (Academic Press, New York, 1987)). When a marker in the vector system expressing antibody is amplifiable, increase in the level of inhibitor present in culture of host cell will increase the number of copies of the marker gene. Since the amplified region is associated with the antibody gene, production of the antibody will also increase (Crouse et al., Mol. Cell. Biol. 3:257 (1983)).

[0263] Vectors which use glutamine synthase (GS) or DHFR as the selectable markers can be amplified in the presence of the drugs methionine sulphoximine or methotrexate, respectively. An advantage of glutamine synthase based vectors are the availabilty of cell lines (e.g., the murine myeloma cell line, NSO) which are glutamine synthase negative. Glutamine synthase expression systems can also function in glutamine synthase expressing cells (e.g. Chinese Hamster Ovary (CHO) cells) by providing additional inhibitor to prevent the functioning of the endogenous gene. A glutamine synthase expression system and components thereof are detailed in PCT publications: WO87/04462; WO86/05807; WO89/01036; WO89/10404; and WO91/06657 which are incorporated in their entireties by reference herein. Additionally, glutamine synthase expression vectors that may be used according to the present invention are commercially available from suplliers, including, for example Lonza Biologics, Inc. (Portsmouth, N.H.). Expression and production of monoclonal antibodies using a GS expression system in murine myeloma cells is described in Bebbington et al., Bio/technology 10:169(1992) and in Biblia and Robinson Biotechnol. Prog. 11:1 (1995) which are incorporated in their entirities by reference herein.

[0264] The host cell may be co-transfected with two expression vectors of the invention, the first vector encoding a heavy chain derived polypeptide and the second vector encoding a light chain derived polypeptide. The two vectors may contain identical selectable markers which enable equal expression of heavy and light chain polypeptides. Alternatively, a single vector may be used which encodes, and is capable of expressing, both heavy and light chain polypeptides. In such situations, the light chain should be placed before the heavy chain to avoid an excess of toxic free heavy chain (Proudfoot, Nature 322:52 (1986); Kohler, Proc. Natl. Acad. Sci. USA 77:2197 (1980)). The coding sequences for the heavy and light chains may comprise cDNA or genomic DNA.

[0265] Once an antibody molecule of the invention has been produced by an animal, chemically synthesized, or recombinantly expressed, it may be purified by any method known in the art for purification of an immunoglobulin molecule, for example, by chromatography (e.g., ion exchange, affinity, particularly by affinity for the specific antigen after Protein A, and sizing column chromatography), centrifugation, differential solubility, or by any other standard technique for the purification of proteins. In addition, the antibodies of the present invention or fragments thereof can be fused to heterologous polypeptide sequences described herein or otherwise known in the art, to facilitate purification.

[0266] The present invention encompasses antibodies recombinantly fused or chemically conjugated (including both covalently and non-covalently conjugations) to a polypeptide (or portion thereof, preferably at least 10, 20, 30, 40, 50, 60, 70, 80, 90 or 100 amino acids of the polypeptide) of the present invention to generate fusion proteins. The fusion does not necessarily need to be direct, but may occur through linker sequences. The antibodies may be specific for antigens other than polypeptides (or portion thereof, preferably at least 10, 20, 30, 40, 50, 60, 70, 80, 90 or 100 amino acids of the polypeptide) of the present invention. For example, antibodies may be used to target the polypeptides of the present invention to particular cell types, either in vitro or in vivo, by fusing or conjugating the polypeptides of the present invention to antibodies specific for particular cell surface receptors. Antibodies fused or conjugated to the polypeptides of the present invention may also be used in in vitro immunoassays and purification methods using methods known in the art. See e.g., Harbor et al., supra, and PCT publication WO 93/21232; EP 439,095; Naramura et al., Immunol. Lett. 39:91-99 (1994); U.S. Pat. No. 5,474,981; Gillies et al., PNAS 89:1428-1432 (1992); Fell et al., J. Immunol. 146:2446-2452 (1991), which are incorporated by reference in their entireties.

[0267] The present invention further includes compositions comprising the polypeptides of the present invention fused or conjugated to antibody domains other than the variable regions. For example, the polypeptides of the present invention may be fused or conjugated to an antibody Fc region, or portion thereof. The antibody portion fused to a polypeptide of the present invention may comprise the constant region, hinge region, CH1 domain, CH2 domain, and CH3 domain or any combination of whole domains or portions thereof. The polypeptides may also be fused or conjugated to the above antibody portions to form multimers. For example, Fc portions fused to the polypeptides of the present invention can form dimers through disulfide bonding between the Fc portions. Higher multimeric forms can be made by fusing the polypeptides to portions of IgA and IgM. Methods for fusing or conjugating the polypeptides of the present invention to antibody portions are known in the art. See, e.g., U.S. Pat. Nos. 5,336,603; 5,622,929; 5,359,046; 5,349,053; 5,447,851; 5,112,946; EP 307,434; EP 367,166; PCT publications WO 96/04388; WO 91/06570; Ashkenazi et al., Proc. Natl. Acad. Sci. USA 88:10535-10539 (1991); Zheng et al., J. Immunol. 154:5590-5600 (1995); and Vil et al., Proc. Natl. Acad. Sci. USA 89:11337-11341 (1992) (said references incorporated by reference in their entireties).

[0268] As discussed, supra, the polypeptides corresponding to a polypeptide, polypeptide fragment, or a variant of SEQ ID NO:Y may be fused or conjugated to the above antibody portions to increase the in vivo half life of the polypeptides or for use in immunoassays using methods known in the art. Further, the polypeptides corresponding to SEQ ID NO:Y may be fused or conjugated to the above antibody portions to facilitate purification. One reported example describes chimeric proteins consisting of the first two domains of the human CD4-polypeptide and various domains of the constant regions of the heavy or light chains of mammalian immunoglobulins. See EP 394,827; and Traunecker et al., Nature 331:84-86 (1988). The polypeptides of the present invention fused or conjugated to an antibody having disulfide- linked dimeric structures (due to the IgG) may also be more efficient in binding and neutralizing other molecules, than the monomeric secreted protein or protein fragment alone. See, for example, Fountoulakis et al., J. Biochem. 270:3958-3964 (1995). In many cases, the Fc part in a fusion protein is beneficial in therapy and diagnosis, and thus can result in, for example, improved pharmacokinetic properties. See, for example, EP A 232,262. Alternatively, deleting the Fc part after the fusion protein has been expressed, detected, and purified, would be desired. For example, the Fc portion may hinder therapy and diagnosis if the fusion protein is used as an antigen for immunizations. In drug discovery, for example, human proteins, such as hIL-5, have been fused with Fc portions for the purpose of high-throughput screening assays to identify antagonists of hIL-5. (See, Bennett et al., J. Molecular Recognition 8:52-58 (1995); Johanson et al., J. Biol. Chem. 270:9459-9471 (1995)).

[0269] Moreover, the antibodies or fragments thereof of the present invention can be fused to marker sequences, such as a peptide to facilitate purification. In preferred embodiments, the marker amino acid sequence is a hexa-histidine peptide, such as the tag provided in a pQE vector (QIAGEN, Inc., 9259 Eton Avenue, Chatsworth, Calif., 91311), among others, many of which are commercially available. As described in Gentz et al., Proc. Natl. Acad. Sci. USA 86:821-824 (1989), for instance, hexa-histidine provides for convenient purification of the fusion protein. Other peptide tags useful for purification include, but are not limited to, the “HA” tag, which corresponds to an epitope derived from the influenza hemagglutinin protein (Wilson et al., Cell 37:767 (1984)) and the “flag” tag.

[0270] The present invention further encompasses antibodies or fragments thereof conjugated to a diagnostic or therapeutic agent. The antibodies can be used diagnostically to, for example, monitor the development or progression of a tumor as part of a clinical testing, procedure to, e.g., determine the efficacy of a given treatment regimen. Detection can be facilitated by coupling the antibody to a detectable substance. Examples of detectable substances include various enzymes, prosthetic groups, fluorescent materials, luminescent materials, bioluminescent materials, radioactive materials, positron emitting metals using various positron emission tomographies, and nonradioactive paramagnetic metal ions. The detectable substance may be coupled or conjugated either directly to the antibody (or fragment thereof) or indirectly, through an intermediate (such as, for example, a linker known in the art) using techniques known in the art. See, for example, U.S. Pat. No. 4,741,900 for metal ions which can be conjugated to antibodies for use as diagnostics according to the present invention. Examples of suitable enzymes include horseradish peroxidase, alkaline phosphatase, beta-galactosidase, or acetylcholinesterase; examples of suitable prosthetic group complexes include streptavidin/biotin and avidin/biotin; examples of suitable fluorescent materials include umbelliferone, fluorescein, fluorescein isothiocyanate, rhodamine, dichlorotriazinylamine fluorescein, dansyl chloride or phycoerythrin; an example of a luminescent material includes luminol; examples of bioluminescent materials include luciferase, luciferin, and aequorin; and examples of suitable radioactive material include 125I, 131I, 111In or 99Tc.

[0271] Further, an antibody or fragment thereof may be conjugated to a therapeutic moiety such as a cytotoxin, e.g., a cytostatic or cytocidal agent, a therapeutic agent or a radioactive metal ion, e.g., alpha-emitters such as, for example, 213Bi. A cytotoxin or cytotoxic agent includes any agent that is detrimental to cells. Examples include paclitaxol, cytochalasin B, gramicidin D, ethidium bromide, emetine, mitomycin, etoposide, tenoposide, vincristine, vinblastine, colchicin, doxorubicin, daunorubicin, dihydroxy anthracin dione, mitoxantrone, mithramycin, actinomycin D, 1-dehydrotestosterone, glucocorticoids, procaine, tetracaine, lidocaine, propranolol, and puromycin and analogs or homologs thereof. Therapeutic agents include, but are not limited to, antimetabolites (e.g., methotrexate, 6-mercaptopurine, 6-thioguanine, cytarabine, 5-fluorouracil decarbazine), alkylating agents (e.g., mechlorethamine, thioepa chlorambucil, melphalan, carmustine (BSNU) and lomustine (CCNU), cyclothosphamide, busulfan, dibromomannitol, streptozotocin, mitomycin C, and cis- dichlorodiamine platinum (II) (DDP) cisplatin), anthracyclines (e.g., daunorubicin (formerly daunomycin) and doxorubicin), antibiotics (e.g., dactinomycin (formerly actinomycin), bleomycin, mithramycin, and anthramycin (AMC)), and anti-mitotic agents (e.g., vincristine and vinblastine).

[0272] The conjugates of the invention can be used for modifying a given biological response, the therapeutic agent or drug moiety is not to be construed as limited to classical chemical therapeutic agents. For example, the drug moiety may be a protein or polypeptide possessing a desired biological activity. Such proteins may include, for example, a toxin such as abrin, ricin A, pseudomonas exotoxin, or diphtheria toxin; a protein such as tumor necrosis factor, a-interferon, β-interferon, nerve growth factor, platelet derived growth factor, tissue plasminogen activator, an apoptotic agent, e.g., TNF-alpha, TNF-beta, AIM I (See, International Publication No. WO 97/33899), AIM II (See, International Publication No. WO 97/34911), Fas Ligand (Takahashi et al., Int. Immunol., 6:1567-1574 (1994)), VEGI (See, International Publication No. WO 99/23105), a thrombotic agent or an anti-angiogenic agent, e.g., angiostatin or endostatin; or, biological response modifiers such as, for example, lymphokines, interleukin-1 (“IL-1”), interleukin-2 (“IL-2”), interleukin-6 (“IL-6”), granulocyte macrophage colony stimulating factor (“GM-CSF”), granulocyte colony stimulating factor (“G-CSF”), or other growth factors.

[0273] Antibodies may also be attached to solid supports, which are particularly useful for immunoassays or purification of the target antigen. Such solid supports include, but are not limited to, glass, cellulose, polyacrylamide, nylon, polystyrene, polyvinyl chloride or polypropylene.

[0274] Techniques for conjugating such therapeutic moiety to antibodies are well known. See, for example, Arnon et al., “Monoclonal Antibodies For Immunotargeting Of Drugs In Cancer Therapy”, in Monoclonal Antibodies And Cancer Therapy, Reisfeld et al. (eds.), pp. 243-56 (Alan R. Liss, Inc. 1985); Hellstrom et al., “Antibodies For Drug Delivery”, in Controlled Drug Delivery (2nd Ed.), Robinson et al. (eds.), pp. 623-53 (Marcel Dekker, Inc. 1987); Thorpe, “Antibody Carriers Of Cytotoxic Agents In Cancer Therapy: A Review”, in Monoclonal Antibodies '84: Biological And Clinical Applications, Pinchera et al. (eds.), pp. 475-506 (1985); “Analysis, Results, And Future Prospective Of The Therapeutic Use Of Radiolabeled Antibody In Cancer Therapy”, in Monoclonal Antibodies For Cancer Detection And Therapy, Baldwin et al. (eds.), pp. 303-16 (Academic Press 1985), and Thorpe et al., “The Preparation And Cytotoxic Properties Of Antibody-Toxin Conjugates”, Immunol. Rev. 62:119-58 (1982).

[0275] Alternatively, an antibody can be conjugated to a second antibody to form an antibody heteroconjugate as described by Segal in U.S. Pat. No. 4,676,980, which is incorporated herein by reference in its entirety.

[0276] An antibody, with or without a therapeutic moiety conjugated to it, administered alone or in combination with cytotoxic factor(s) and/or cytokine(s) can be used as a therapeutic.

[0277] Immunophenotyping

[0278] The antibodies of the invention may be utilized for immunophenotyping of cell lines and biological samples. Translation products of the gene of the present invention may be useful as cell-specific markers, or more specifically as cellular markers that are differentially expressed at various stages of differentiation and/or maturation of particular cell types. Monoclonal antibodies directed against a specific epitope, or combination of epitopes, will allow for the screening of cellular populations expressing the marker. Various techniques can be utilized using monoclonal antibodies to screen for cellular populations expressing the marker(s), and include magnetic separation using antibody-coated magnetic beads, “panning” with antibody attached to a solid matrix (i.e., plate), and flow cytometry (See, e.g., U.S. Pat. No. 5,985,660; and Morrison et al., Cell, 96:737-49 (1999)).

[0279] These techniques allow for the screening of particular populations of cells, such as might be found with hematological malignancies (i.e. minimal residual disease (MRD) in acute leukemic patients) and “non-self” cells in transplantations to prevent Graft-versus-Host Disease (GVHD). Alternatively, these techniques allow for the screening of hematopoietic stem and progenitor cells capable of undergoing proliferation and/or differentiation, as might be found in human umbilical cord blood.

[0280] Assays for Antibody Binding

[0281] The antibodies of the invention may be assayed for immunospecific binding by any method known in the art. The immunoassays which can be used include but are not limited to competitive and non-competitive assay systems using techniques such as western blots, radioimmunoassays, ELISA (enzyme linked immunosorbent assay), “sandwich” immunoassays, immunoprecipitation assays, precipitin reactions, gel diffusion precipitin reactions, immunodiffusion assays, agglutination assays, complement-fixation assays, immunoradiometric assays, fluorescent immunoassays, and protein A immunoassays, to name but a few. Such assays are routine and well known in the art (see, e.g., Ausubel et al, eds, 1994, Current Protocols in Molecular Biology, Vol. 1, John Wiley & Sons, Inc., New York, which is incorporated by reference herein in its entirety). Exemplary immunoassays are described briefly below (but are not intended by way of limitation).

[0282] Immunoprecipitation protocols generally comprise lysing a population of cells in a lysis buffer such as RIPA buffer (1% NP-40 or Triton X-100, 1% sodium deoxycholate, 0.1% SDS, 0.15 M NaCl, 0.01 M sodium phosphate at pH 7.2, 1% Trasylol) supplemented with protein phosphatase and/or protease inhibitors (e.g., EDTA, PMSF, aprotinin, sodium vanadate), adding the antibody of interest to the cell lysate, incubating for a period of time (e.g., 1-4 hours) at 4° C., adding protein A and/or protein G sepharose beads to the cell lysate, incubating for about an hour or more at 4° C., washing the beads in lysis buffer and resuspending the beads in SDS/sample buffer. The ability of the antibody of interest to immunoprecipitate a particular antigen can be assessed by, e.g., western blot analysis. One of skill in the art would be knowledgeable as to the parameters that can be modified to increase the binding of the antibody to an antigen and decrease the background (e.g., pre-clearing the cell lysate with sepharose beads). For further discussion regarding immunoprecipitation protocols see, e.g., Ausubel et al., eds., (1994), Current Protocols in Molecular Biology, Vol. 1, John Wiley & Sons, Inc., New York, section 10.16.1.

[0283] Western blot analysis generally comprises preparing protein samples, electrophoresis of the protein samples in a polyacrylamide gel (e.g., 8%-20% SDS-PAGE depending on the molecular weight of the antigen), transferring the protein sample from the polyacrylamide gel to a membrane such as nitrocellulose, PVDF or nylon, blocking the membrane in blocking solution (e.g., PBS with 3% BSA or non-fat milk), washing the membrane in washing buffer (e.g., PBS-Tween 20), blocking the membrane with primary antibody (the antibody of interest) diluted in blocking buffer, washing the membrane in washing buffer, blocking the membrane with a secondary antibody (which recognizes the primary antibody, e.g., an anti-human antibody) conjugated to an enzymatic substrate (e.g., horseradish peroxidase or alkaline phosphatase) or radioactive molecule (e.g., 32P or 1251) diluted in blocking buffer, washing the membrane in wash buffer, and detecting the presence of the antigen. One of skill in the art would be knowledgeable as to the parameters that can be modified to increase the signal detected and to reduce the background noise. For further discussion regarding western blot protocols see, e.g., Ausubel et al, eds, (1994), Current Protocols in Molecular Biology, Vol. 1, John Wiley & Sons, Inc., New York, section 10.8.1.

[0284] ELISAs comprise preparing antigen, coating the well of a 96 well microtiter plate with the antigen, adding the antibody of interest conjugated to a detectable compound such as an enzymatic substrate (e.g., horseradish peroxidase or alkaline phosphatase) to the well and incubating for a period of time, and detecting the presence of the antigen. In ELISAs the antibody of interest does not have to be conjugated to a detectable compound; instead, a second antibody (which recognizes the antibody of interest) conjugated to a detectable compound may be added to the well. Further, instead of coating the well with the antigen, the antibody may be coated to the well. In this case, a second antibody conjugated to a detectable compound may be added following the addition of the antigen of interest to the coated well. One of skill in the art would be knowledgeable as to the parameters that can be modified to increase the signal detected as well as other variations of ELISAs known in the art. For further discussion regarding ELISAs see, e.g., Ausubel et al, eds, (1994), Current Protocols in Molecular Biology, Vol. 1, John Wiley & Sons, Inc., New York, section 11.2.1.

[0285] The binding affinity of an antibody to an antigen and the off-rate of an antibody-antigen interaction can be determined by competitive binding assays. One example of a competitive binding assay is a radioimmunoassay comprising the incubation of labeled antigen (e.g., 3H or 1251) with the antibody of interest in the presence of increasing amounts of unlabeled antigen, and the detection of the antibody bound to the labeled antigen. The affinity of the antibody of interest for a particular antigen and the binding off-rates can be determined from the data by scatchard plot analysis. Competition with a second antibody can also be determined using radioimmunoassays. In this case, the antigen is incubated with antibody of interest conjugated to a labeled compound (e.g., 3H or 125I) in the presence of increasing amounts of an unlabeled second antibody.

[0286] Antibodies of the invention may be characterized using immunocytochemisty methods on cells (e.g., mammalian cells, such as CHO cells) transfected with a vector enabling the expression of an antigen or with vector alone using techniques commonly known in the art. Antibodies that bind antigen transfected cells, but not vector-only transfected cells, are antigen specific.

[0287] Therapeutic Uses

[0288] The present invention is further directed to antibody-based therapies which involve administering antibodies of the invention to an animal, preferably a mammal, and most preferably a human, patient for treating one or more of the disclosed diseases, disorders, or conditions. Therapeutic compounds of the invention include, but are not limited to, antibodies of the invention (including fragments, analogs and derivatives thereof as described herein) and nucleic acids encoding antibodies of the invention (including fragments, analogs and derivatives thereof and anti-idiotypic antibodies as described herein). The antibodies of the invention can be used to treat, inhibit or prevent diseases, disorders or conditions associated with aberrant expression and/or activity of a polypeptide of the invention, including, but not limited to, any one or more of the diseases, disorders, or conditions described herein. The treatment and/or prevention of diseases, disorders, or conditions associated with aberrant expression and/or activity of a polypeptide of the invention includes, but is not limited to, alleviating symptoms associated with those diseases, disorders or conditions. Antibodies of the invention may be provided in pharmaceutically acceptable compositions as known in the art or as described herein.

[0289] In a specific and preferred embodiment, the present invention is directed to antibody-based therapies which involve administering antibodies of the invention to an animal, preferably a mammal, and most preferably a human, patient for treating one or more diseases, disorders, or conditions, including but not limited to: neural disorders, immune system disorders, muscular disorders, reproductive disorders, gastrointestinal disorders, pulmonary disorders, cardiovascular disorders, renal disorders, proliferative disorders, and/or cancerous diseases and conditions, and/or as described elsewhere herein. Therapeutic compounds of the invention include, but are not limited to, antibodies of the invention (e.g., antibodies directed to the full length protein expressed on the cell surface of a mammalian cell; antibodies directed to an epitope of a polypeptide of the invention (such as, for example, a predicted linear epitope shown in column 7 of Table 1A; or a conformational epitope, including fragments, analogs and derivatives thereof as described herein) and nucleic acids encoding antibodies of the invention (including fragments, analogs and derivatives thereof and anti-idiotypic antibodies as described herein). The antibodies of the invention can be used to treat, inhibit or prevent diseases, disorders or conditions associated with aberrant expression and/or activity of a polypeptide of the invention, including, but not limited to, any one or more of the diseases, disorders, or conditions described herein. The treatment and/or prevention of diseases, disorders, or conditions associated with aberrant expression and/or activity of a polypeptide of the invention includes, but is not limited to, alleviating symptoms associated with those diseases, disorders or conditions. Antibodies of the invention may be provided in pharmaceutically acceptable compositions as known in the art or as described herein.

[0290] A summary of the ways in which the antibodies of the present invention may be used therapeutically includes binding polynucleotides or polypeptides of the present invention locally or systemically in the body or by direct cytotoxicity of the antibody, e.g. as mediated by complement (CDC) or by effector cells (ADCC). Some of these approaches are described in more detail below. Armed with the teachings provided herein, one of ordinary skill in the art will know how to use the antibodies of the present invention for diagnostic, monitoring or therapeutic purposes without undue experimentation.

[0291] The antibodies of this invention may be advantageously utilized in combination with other monoclonal or chimeric antibodies, or with lymphokines or hematopoietic growth factors (such as, e.g., IL-2, IL-3 and IL-7), for example, which serve to increase the number or activity of effector cells which interact with the antibodies.

[0292] The antibodies of the invention may be administered alone or in combination with other types of treatments (e.g., radiation therapy, chemotherapy, hormonal therapy, immunotherapy and anti-tumor agents). Generally, administration of products of a species origin or species reactivity (in the case of antibodies) that is the same species as that of the patient is preferred. Thus, in a preferred embodiment, human antibodies, fragments derivatives, analogs, or nucleic acids, are administered to a human patient for therapy or prophylaxis.

[0293] It is preferred to use high affinity and/or potent in vivo inhibiting and/or neutralizing antibodies against polypeptides or polynucleotides of the present invention, fragments or regions thereof, for both immunoassays directed to and therapy of disorders related to polynucleotides or polypeptides, including fragments thereof, of the present invention. Such antibodies, fragments, or regions, will preferably have an affinity for polynucleotides or polypeptides of the invention, including fragments thereof. Preferred binding affinities include those with a dissociation constant or Kd less than 5×10⁻² M, 10⁻² M, 5×10⁻³ M, 10⁻³ M, 5×10⁻⁴ M, 10⁻⁴ M, 5×10⁻⁵ M, 10⁻⁵ M, 5×10⁻⁶ M, 10⁻⁶ M, 5×10⁻⁷ M, 10⁻⁷ M, 5×10⁻⁸ M, 10⁻⁸ M, 5×10⁻⁹ M, 10⁻⁹ M, 5×10⁻¹⁰ M, 10⁻¹⁰ M, 5×10⁻¹¹ M, 10⁻¹¹ M, 5×10⁻¹² M, 10⁻¹² M, 5×10⁻¹³ M, 10⁻¹³ M, 5×10⁻¹⁴ M, 10⁻¹⁴ M, 5×10⁻¹⁵ M, and 10⁻¹⁵ M.

[0294] Gene Therapy

[0295] In a specific embodiment, nucleic acids comprising sequences encoding antibodies or functional derivatives thereof, are administered to treat, inhibit or prevent a disease or disorder associated with aberrant expression and/or activity of a polypeptide of the invention, by way of gene therapy. Gene therapy refers to therapy performed by the administration to a subject of an expressed or expressible nucleic acid. In this embodiment of the invention, the nucleic acids produce their encoded protein that mediates a therapeutic effect.

[0296] Any of the methods for gene therapy available in the art can be used according to the present invention. Exemplary methods are described below.

[0297] For general reviews of the methods of gene therapy, see Goldspiel et al., Clinical Pharmacy 12:488-505 (1993); Wu and Wu, Biotherapy 3:87-95 (1991); Tolstoshev, Ann. Rev. Pharmacol. Toxicol. 32:573-596 (1993); Mulligan, Science 260:926-932 (1993); and Morgan and Anderson, Ann. Rev. Biochem. 62:191-217 (1993); May, TIBTECH 11(5):155-215 (1993). Methods commonly known in the art of recombinant DNA technology which can be used are described in Ausubel et al. (eds.), Current Protocols in Molecular Biology, John Wiley & Sons, NY (1993); and Kriegler, Gene Transfer and Expression, A Laboratory Manual, Stockton Press, NY (1990).

[0298] In a preferred embodiment, the compound comprises nucleic acid sequences encoding an antibody, said nucleic acid sequences being part of expression vectors that express the antibody or fragments or chimeric proteins or heavy or light chains thereof in a suitable host. In particular, such nucleic acid sequences have promoters operably linked to the antibody coding region, said promoter being inducible or constitutive, and, optionally, tissue-specific. In another particular embodiment, nucleic acid molecules are used in which the antibody coding sequences and any other desired sequences are flanked by regions that promote homologous recombination at a desired site in the genome, thus providing for intrachromosomal expression of the antibody encoding nucleic acids (Koller and Smithies, Proc. Natl. Acad. Sci. USA 86:8932-8935 (1989); Zijlstra et al., Nature 342:435-438 (1989). In specific embodiments, the expressed antibody molecule is a single chain antibody; alternatively, the nucleic acid sequences include sequences encoding both the heavy and light chains, or fragments thereof, of the antibody.

[0299] Delivery of the nucleic acids into a patient may be either direct, in which case the patient is directly exposed to the nucleic acid or nucleic acid- carrying vectors, or indirect, in which case, cells are first transformed with the nucleic acids in vitro, then transplanted into the patient. These two approaches are known, respectively, as in vivo or ex vivo gene therapy.

[0300] In a specific embodiment, the nucleic acid sequences are directly administered in vivo, where it is expressed to produce the encoded product. This can be accomplished by any of numerous methods known in the art, e.g., by constructing them as part of an appropriate nucleic acid expression vector and administering it so that they become intracellular, e.g., by infection using defective or attenuated retrovirals or other viral vectors (see U.S. Pat. No. 4,980,286), or by direct injection of naked DNA, or by use of microparticle bombardment (e.g., a gene gun; Biolistic, Dupont), or coating with lipids or cell-surface receptors or transfecting agents, encapsulation in liposomes, microparticles, or microcapsules, or by administering them in linkage to a peptide which is known to enter the nucleus, by administering it in linkage to a ligand subject to receptor-mediated endocytosis (see, e.g., Wu and Wu, J. Biol. Chem. 262:4429-4432 (1987)) (which can be used to target cell types specifically expressing the receptors), etc. In another embodiment, nucleic acid-ligand complexes can be formed in which the ligand comprises a fusogenic viral peptide to disrupt endosomes, allowing the nucleic acid to avoid lysosomal degradation. In yet another embodiment, the nucleic acid can be targeted in vivo for cell specific uptake and expression, by targeting a specific receptor (see, e.g., PCT Publications WO 92/06180; WO 92/22635; WO92/20316; WO93/14188, WO 93/20221). Alternatively, the nucleic acid can be introduced intracellularly and incorporated within host cell DNA for expression, by homologous recombination (Koller and Smithies, Proc. Natl. Acad. Sci. USA 86:8932-8935 (1989); Zijlstra et al., Nature 342:435-438 (1989)).

[0301] In a specific embodiment, viral vectors that contains nucleic acid sequences encoding an antibody of the invention are used. For example, a retroviral vector can be used (see Miller et al., Meth. Enzymol. 217:581-599 (1993)). These retroviral vectors contain the components necessary for the correct packaging of the viral genome and integration into the host cell DNA. The nucleic acid sequences encoding the antibody to be used in gene therapy are cloned into one or more vectors, which facilitates delivery of the gene into a patient. More detail about retroviral vectors can be found in Boesen et al., Biotherapy 6:291-302 (1994), which describes the use of a retroviral vector to deliver the mdrl gene to hematopoietic stem cells in order to make the stem cells more resistant to chemotherapy. Other references illustrating the use of retroviral vectors in gene therapy are: Clowes et al., J. Clin. Invest. 93:644-651 (1994); Kiem et al., Blood 83:1467-1473 (1994); Salmons and Gunzberg, Human Gene Therapy 4:129-141 (1993); and Grossman and Wilson, Curr. Opin. in Genetics and Devel. 3:110-114 (1993).

[0302] Adenoviruses are other viral vectors that can be used in gene therapy. Adenoviruses are especially attractive vehicles for delivering genes to respiratory epithelia. Adenoviruses naturally infect respiratory epithelia where they cause a mild disease. Other targets for adenovirus-based delivery systems are liver, the central nervous system, endothelial cells, and muscle. Adenoviruses have the advantage of being capable of infecting non-dividing cells. Kozarsky and Wilson, Current Opinion in Genetics and Development 3:499-503 (1993) present a review of adenovirus-based gene therapy. Bout et al., Human Gene Therapy 5:3-10 (1994) demonstrated the use of adenovirus vectors to transfer genes to the respiratory epithelia of rhesus monkeys. Other instances of the use of adenoviruses in gene therapy can be found in Rosenfeld et al., Science 252:431-434 (1991); Rosenfeld et al., Cell 68:143-155 (1992); Mastrangeli et al., J. Clin. Invest. 91:225-234 (1993); PCT Publication WO94/12649; and Wang, et al., Gene Therapy 2:775-783 (1995). In a preferred embodiment, adenovirus vectors are used.

[0303] Adeno-associated virus (AAV) has also been proposed for use in gene therapy (Walsh et al., Proc. Soc. Exp. Biol. Med. 204:289-300 (1993); U.S. Pat. No. 5,436,146).

[0304] Another approach to gene therapy involves transferring a gene to cells in tissue culture by such methods as electroporation, lipofection, calcium phosphate mediated transfection, or viral infection. Usually, the method of transfer includes the transfer of a selectable marker to the cells. The cells are then placed under selection to isolate those cells that have taken up and are expressing the transferred gene. Those cells are then delivered to a patient.

[0305] In this embodiment, the nucleic acid is introduced into a cell prior to administration in vivo of the resulting recombinant cell. Such introduction can be carried out by any method known in the art, including but not limited to transfection, electroporation, microinjection, infection with a viral or bacteriophage vector containing the nucleic acid sequences, cell fusion, chromosome-mediated gene transfer, microcell-mediated gene transfer, spheroplast fusion, etc. Numerous techniques are known in the art for the introduction of foreign genes into cells (see, e.g., Loeffler and Behr, Meth. Enzymol. 217:599-618 (1993); Cohen et al., Meth. Enzymol. 217:618-644 (1993); Cline, Pharmac. Ther. 29:69-92m (1985) and may be used in accordance with the present invention, provided that the necessary developmental and physiological functions of the recipient cells are not disrupted. The technique should provide for the stable transfer of the nucleic acid to the cell, so that the nucleic acid is expressible by the cell and preferably heritable and expressible by its cell progeny.

[0306] The resulting recombinant cells can be delivered to a patient by various methods known in the art. Recombinant blood cells (e.g., hematopoietic stem or progenitor cells) are preferably administered intravenously. The amount of cells envisioned for use depends on the desired effect, patient state, etc., and can be determined by one skilled in the art.

[0307] Cells into which a nucleic acid can be introduced for purposes of gene therapy encompass any desired, available cell type, and include but are not limited to epithelial cells, endothelial cells, keratinocytes, fibroblasts, muscle cells, hepatocytes; blood cells such as T lymphocytes, B lymphocytes, monocytes, macrophages, neutrophils, eosinophils, megakaryocytes, granulocytes; various stem or progenitor cells, in particular hematopoietic stem or progenitor cells, e.g., as obtained from bone marrow, umbilical cord blood, peripheral blood, fetal liver, etc.

[0308] In a preferred embodiment, the cell used for gene therapy is autologous to the patient.

[0309] In an embodiment in which recombinant cells are used in gene therapy, nucleic acid sequences encoding an antibody are introduced into the cells such that they are expressible by the cells or their progeny, and the recombinant cells are then administered in vivo for therapeutic effect. In a specific embodiment, stem or progenitor cells are used. Any stem and/or progenitor cells which can be isolated and maintained in vitro can potentially be used in accordance with this embodiment of the present invention (see e.g. PCT Publication WO 94/08598; Stemple and Anderson, Cell 71:973-985 (1992); Rheinwald, Meth. Cell Bio. 21A:229 (1980); and Pittelkow and Scott, Mayo Clinic Proc. 61:771 (1986)).

[0310] In a specific embodiment, the nucleic acid to be introduced for purposes of gene therapy comprises an inducible promoter operably linked to the coding region, such that expression of the nucleic acid is controllable by the presence or absence of an appropriate inducer of transcription.

[0311] Demonstration of Therapeutic or Prophylactic Activity

[0312] The compounds or pharmaceutical compositions of the invention are preferably tested in vitro, and then in vivo for the desired therapeutic or prophylactic activity, prior to use in humans. For example, in vitro assays to demonstrate the therapeutic or prophylactic utility of a compound or pharmaceutical composition include, the effect of a compound on a cell line or a patient tissue sample. The effect of the compound or composition on the cell line and/or tissue sample can be determined utilizing techniques known to those of skill in the art including, but not limited to, rosette formation assays and cell lysis assays. In accordance with the invention, in vitro assays which can be used to determine whether administration of a specific compound is indicated, include in vitro cell culture assays in which a patient tissue sample is grown in culture, and exposed to or otherwise administered a compound, and the effect of such compound upon the tissue sample is observed.

[0313] Therapeutic/Prophylactic Administration and Composition

[0314] The invention provides methods of treatment, inhibition and prophylaxis by administration to a subject of an effective amount of a compound or pharmaceutical composition of the invention, preferably a polypeptide or antibody of the invention. In a preferred embodiment, the compound is substantially purified (e.g., substantially free from substances that limit its effect or produce undesired side-effects). The subject is preferably an animal, including but not limited to animals such as cows, pigs, horses, chickens, cats, dogs, etc., and is preferably a mammal, and most preferably human.

[0315] Formulations and methods of administration that can be employed when the compound comprises a nucleic acid or an immunoglobulin are described above; additional appropriate formulations and routes of administration can be selected from among those described herein below.

[0316] Various delivery systems are known and can be used to administer a compound of the invention, e.g., encapsulation in liposomes, microparticles, microcapsules, recombinant cells capable of expressing the compound, receptor-mediated endocytosis (see, e.g., Wu and Wu, J. Biol. Chem. 262:4429-4432 (1987)), construction of a nucleic acid as part of a retroviral or other vector, etc. Methods of introduction include but are not limited to intradermal, intramuscular, intraperitoneal, intravenous, subcutaneous, intranasal, epidural, and oral routes. The compounds or compositions may be administered by any convenient route, for example by infusion or bolus injection, by absorption through epithelial or mucocutaneous linings (e.g., oral mucosa, rectal and intestinal mucosa, etc.) and may be administered together with other biologically active agents. Administration can be systemic or local. In addition, it may be desirable to introduce the pharmaceutical compounds or compositions of the invention into the central nervous system by any suitable route, including intraventricular and intrathecal injection; intraventricular injection may be facilitated by an intraventricular catheter, for example, attached to a reservoir, such as an Ommaya reservoir. Pulmonary administration can also be employed, e.g., by use of an inhaler or nebulizer, and formulation with an aerosolizing agent.

[0317] In a specific embodiment, it may be desirable to administer the pharmaceutical compounds or compositions of the invention locally to the area in need of treatment; this may be achieved by, for example, and not by way of limitation, local infusion during surgery, topical application, e.g., in conjunction with a wound dressing after surgery, by injection, by means of a catheter, by means of a suppository, or by means of an implant, said implant being of a porous, non-porous, or gelatinous material, including membranes, such as sialastic membranes, or fibers. Preferably, when administering a protein, including an antibody, of the invention, care must be taken to use materials to which the protein does not absorb.

[0318] In another embodiment, the compound or composition can be delivered in a vesicle, in particular a liposome (see Langer, Science 249:1527-1533 (1990); Treat et al., in Liposomes in the Therapy of Infectious Disease and Cancer, Lopez-Berestein and Fidler (eds.), Liss, New York, pp. 353-3⁶5 (1989); Lopez-Berestein, ibid., pp. 317-327; see generally ibid.)

[0319] In yet another embodiment, the compound or composition can be delivered in a controlled release system. In one embodiment, a pump may be used (see Langer, supra; Sefton, CRC Crit. Ref. Biomed. Eng. 14:201 (1987); Buchwald et al., Surgery 88:507 (1980); Saudek et al., N. Engl. J. Med. 321:574 (1989)). In another embodiment, polymeric materials can be used (see Medical Applications of Controlled Release, Langer and Wise (eds.), CRC Pres., Boca Raton, Fla. (1974); Controlled Drug Bioavailability, Drug Product Design and Performance, Smolen and Ball (eds.), Wiley, N.Y. (1984); Ranger and Peppas, J., Macromol. Sci. Rev. Macromol. Chem. 23:61 (1983); see also Levy et al., Science 228:190 (1985); During et al., Ann. Neurol. 25:351 (1989); Howard et al., J.Neurosurg. 71:105 (1989)). In yet another embodiment, a controlled release system can be placed in proximity of the therapeutic target, e.g., the brain, thus requiring only a fraction of the systemic dose (see, e.g., Goodson, in Medical Applications of Controlled Release, supra, vol. 2, pp. 115-138 (1984)).

[0320] Other controlled release systems are discussed in the review by Langer (Science 249:1527-1533 (1990)).

[0321] In a specific embodiment where the compound of the invention is a nucleic acid encoding a protein, the nucleic acid can be administered in vivo to promote expression of its encoded protein, by constructing it as part of an appropriate nucleic acid expression vector and administering it so that it becomes intracellular, e.g., by use of a retroviral vector (see U.S. Pat. No. 4,980,286), or by direct injection, or by use of microparticle bombardment (e.g., a gene gun; Biolistic, Dupont), or coating with lipids or cell-surface receptors or transfecting agents, or by administering it in linkage to a homeobox- like peptide which is known to enter the nucleus (see e.g., Joliot et al., Proc. Natl. Acad. Sci. USA 88:1864-1868 (1991)), etc. Alternatively, a nucleic acid can be introduced intracellularly and incorporated within host cell DNA for expression, by homologous recombination.

[0322] The present invention also provides pharmaceutical compositions. Such compositions comprise a therapeutically effective amount of a compound, and a pharmaceutically acceptable carrier. In a specific embodiment, the term “pharmaceutically acceptable” means approved by a regulatory agency of the Federal or a state government or listed in the U.S. Pharmacopeia or other generally recognized pharmacopeia for use in animals, and more particularly in humans. The term “carrier” refers to a diluent, adjuvant, excipient, or vehicle with which the therapeutic is administered. Such pharmaceutical carriers can be sterile liquids, such as water and oils, including those of petroleum, animal, vegetable or synthetic origin, such as peanut oil, soybean oil, mineral oil, sesame oil and the like. Water is a preferred carrier when the pharmaceutical composition is administered intravenously. Saline solutions and aqueous dextrose and glycerol solutions can also be employed as liquid carriers, particularly for injectable solutions. Suitable pharmaceutical excipients include starch, glucose, lactose, sucrose, gelatin, malt, rice, flour, chalk, silica gel, sodium stearate, glycerol monostearate, talc, sodium chloride, dried skim milk, glycerol, propylene, glycol, water, ethanol and the like. The composition, if desired, can also contain minor amounts of wetting or emulsifying agents, or pH buffering agents. These compositions can take the form of solutions, suspensions, emulsion, tablets, pills, capsules, powders, sustained-release formulations and the like. The composition can be formulated as a suppository, with traditional binders and carriers such as triglycerides. Oral formulation can include standard carriers such as pharmaceutical grades of mannitol, lactose, starch, magnesium stearate, sodium saccharine, cellulose, magnesium carbonate, etc. Examples of suitable pharmaceutical carriers are described in “Remington's Pharmaceutical Sciences” by E. W. Martin. Such compositions will contain a therapeutically effective amount of the compound, preferably in purified form, together with a suitable amount of carrier so as to provide the form for proper administration to the patient. The formulation should suit the mode of administration.

[0323] In a preferred embodiment, the composition is formulated in accordance with routine procedures as a pharmaceutical composition adapted for intravenous administration to human beings. Typically, compositions for intravenous administration are solutions in sterile isotonic aqueous buffer. Where necessary, the composition may also include a solubilizing agent and a local anesthetic such as lignocaine to ease pain at the site of the injection. Generally, the ingredients are supplied either separately or mixed together in unit dosage form, for example, as a dry lyophilized powder or water free concentrate in a hermetically sealed container such as an ampoule or sachette indicating the quantity of active agent. Where the composition is to be administered by infusion, it can be dispensed with an infusion bottle containing sterile pharmaceutical grade water or saline. Where the composition is administered by injection, an ampoule of sterile water for injection or saline can be provided so that the ingredients may be mixed prior to administration.

[0324] The compounds of the invention can be formulated as neutral or salt forms. Pharmaceutically acceptable salts include those formed with anions such as those derived from hydrochloric, phosphoric, acetic, oxalic, tartaric acids, etc., and those formed with cations such as those derived from sodium, potassium, ammonium, calcium, ferric hydroxides, isopropylamine, triethylamine, 2-ethylamino ethanol, histidine, procaine, etc.

[0325] The amount of the compound of the invention which will be effective in the treatment, inhibition and prevention of a disease or disorder associated with aberrant expression and/or activity of a polypeptide of the invention can be determined by standard clinical techniques. In addition, in vitro assays may optionally be employed to help identify optimal dosage ranges. The precise dose to be employed in the formulation will also depend on the route of administration, and the seriousness of the disease or disorder, and should be decided according to the judgment of the practitioner and each patient's circumstances. Effective doses may be extrapolated from dose-response curves derived from in vitro or animal model test systems.

[0326] For antibodies, the dosage administered to a patient is typically 0.1 mg/kg to 100 mg/kg of the patient's body weight. Preferably, the dosage administered to a patient is between 0.1 mg/kg and 20 mg/kg of the patient's body weight, more preferably 1 mg/kg to 10 mg/kg of the patient's body weight. Generally, human antibodies have a longer half-life within the human body than antibodies from other species due to the immune response to the foreign polypeptides. Thus, lower dosages of human antibodies and less frequent administration is often possible. Further, the dosage and frequency of administration of antibodies of the invention may be reduced by enhancing uptake and tissue penetration (e.g., into the brain) of the antibodies by modifications such as, for example, lipidation.

[0327] The invention also provides a pharmaceutical pack or kit comprising one or more containers filled with one or more of the ingredients of the pharmaceutical compositions of the invention. Optionally associated with such container(s) can be a notice in the form prescribed by a governmental agency regulating the manufacture, use or sale of pharmaceuticals or biological products, which notice reflects approval by the agency of manufacture, use or sale for human administration.

[0328] Diagnosis and Imaging

[0329] Labeled antibodies, and derivatives and analogs thereof, which specifically bind to a polypeptide of interest can be used for diagnostic purposes to detect, diagnose, or monitor diseases, disorders, and/or conditions associated with the aberrant expression and/or activity of a polypeptide of the invention. The invention provides for the detection of aberrant expression of a polypeptide of interest, comprising (a) assaying the expression of the polypeptide of interest in cells or body fluid of an individual using one or more antibodies specific to the polypeptide interest and (b) comparing the level of gene expression with a standard gene expression level, whereby an increase or decrease in the assayed polypeptide gene expression level compared to the standard expression level is indicative of aberrant expression.

[0330] The invention provides a diagnostic assay for diagnosing a disorder, comprising (a) assaying the expression of the polypeptide of interest in cells or body fluid of an individual using one or more antibodies specific to the polypeptide interest and (b) comparing the level of gene expression with a standard gene expression level, whereby an increase or decrease in the assayed polypeptide gene expression level compared to the standard expression level is indicative of a particular disorder. With respect to cancer, the presence of a relatively high amount of transcript in biopsied tissue from an individual may indicate a predisposition for the development of the disease, or may provide a means for detecting the disease prior to the appearance of actual clinical symptoms. A more definitive diagnosis of this type may allow health professionals to employ preventative measures or aggressive treatment earlier thereby preventing the development or further progression of the cancer.

[0331] Antibodies of the invention can be used to assay protein levels in a biological sample using classical immunohistological methods known to those of skill in the art (e.g., see Jalkanen et al., J. Cell. Biol. 101:976-985 (1985); Jalkanen et al., J. Cell. Biol. 105:3087-3096 (1987)). Other antibody-based methods useful for detecting protein gene expression include immunoassays, such as the enzyme linked immunosorbent assay (ELISA) and the radioimmunoassay (RIA). Suitable antibody assay labels are known in the art and include enzyme labels, such as, glucose oxidase; radioisotopes, such as iodine (125I, 121I), carbon (14C), sulfur (35S), tritium (3H), indium (112In), and technetium (99Tc); luminescent labels, such as luminol; and fluorescent labels, such as fluorescein and rhodamine, and biotin.

[0332] One facet of the invention is the detection and diagnosis of a disease or disorder associated with aberrant expression of a polypeptide of interest in an animal, preferably a mammal and most preferably a human. In one embodiment, diagnosis comprises: a) administering (for example, parenterally, subcutaneously, or intraperitoneally) to a subject an effective amount of a labeled molecule which specifically binds to the polypeptide of interest; b) waiting for a time interval following the administering for permitting the labeled molecule to preferentially concentrate at sites in the subject where the polypeptide is expressed (and for unbound labeled molecule to be cleared to background level); c) determining background level; and d) detecting the labeled molecule in the subject, such that detection of labeled molecule above the background level indicates that the subject has a particular disease or disorder associated with aberrant expression of the polypeptide of interest. Background level can be determined by various methods including, comparing the amount of labeled molecule detected to a standard value previously determined for a particular system.

[0333] It will be understood in the art that the size of the subject and the imaging system used will determine the quantity of imaging moiety needed to produce diagnostic images. In the case of a radioisotope moiety, for a human subject, the quantity of radioactivity injected will normally range from about 5 to 20 millicuries of 99mTc. The labeled antibody or antibody fragment will then preferentially accumulate at the location of cells which contain the specific protein. In vivo tumor imaging is described in S. W. Burchiel et al., “Immunopharmacokinetics of Radiolabeled Antibodies and Their Fragments.” (Chapter 13 in Tumor Imaging: The Radiochemical Detection of Cancer, S. W. Burchiel and B. A. Rhodes, eds., Masson Publishing Inc. (1982)).

[0334] Depending on several variables, including the type of label used and the mode of administration, the time interval following the administration for permitting the labeled molecule to preferentially concentrate at sites in the subject and for unbound labeled molecule to be cleared to background level is 6 to 48 hours or 6 to 24 hours or 6 to 12 hours. In another embodiment the time interval following administration is 5 to 20 days or 5 to 10 days.

[0335] In an embodiment, monitoring of the disease or disorder is carried out by repeating the method for diagnosing the disease or disease, for example, one month after initial diagnosis, six months after initial diagnosis, one year after initial diagnosis, etc.

[0336] Presence of the labeled molecule can be detected in the patient using methods known in the art for in vivo scanning. These methods depend upon the type of label used. Skilled artisans will be able to determine the appropriate method for detecting a particular label. Methods and devices that may be used in the diagnostic methods of the invention include, but are not limited to, computed tomography (CT), whole body scan such as position emission tomography (PET), magnetic resonance imaging (MRI), and sonography.

[0337] In a specific embodiment, the molecule is labeled with a radioisotope and is detected in the patient using a radiation responsive surgical instrument (Thurston et al., U.S. Pat. No. 5,441,050). In another embodiment, the molecule is labeled with a fluorescent compound and is detected in the patient using a fluorescence responsive scanning instrument. In another embodiment, the molecule is labeled with a positron emitting metal and is detected in the patent using positron emission-tomography. In yet another embodiment, the molecule is labeled with a paramagnetic label and is detected in a patient using magnetic resonance imaging (MRI).

[0338] Kits

[0339] The present invention provides kits that can be used in the above methods. In one embodiment, a kit comprises an antibody of the invention, preferably a purified antibody, in one or more containers. In a specific embodiment, the kits of the present invention contain a substantially isolated polypeptide comprising an epitope which is specifically immunoreactive with an antibody included in the kit. Preferably, the kits of the present invention further comprise a control antibody which does not react with the polypeptide of interest. In another specific embodiment, the kits of the present invention contain a means for detecting the binding of an antibody to a polypeptide of interest (e.g., the antibody may be conjugated to a detectable substrate such as a fluorescent compound, an enzymatic substrate, a radioactive compound or a luminescent compound, or a second antibody which recognizes the first antibody may be conjugated to a detectable substrate).

[0340] In another specific embodiment of the present invention, the kit is a diagnostic kit for use in screening serum containing antibodies specific against proliferative and/or cancerous polynucleotides and polypeptides. Such a kit may include a control antibody that does not react with the polypeptide of interest. Such a kit may include a substantially isolated polypeptide antigen comprising an epitope which is specifically immunoreactive with at least one anti-polypeptide antigen antibody. Further, such a kit includes means for detecting the binding of said antibody to the antigen (e.g., the antibody may be conjugated to a fluorescent compound such as fluorescein or rhodamine which can be detected by flow cytometry). In specific embodiments, the kit may include a recombinantly produced or chemically synthesized polypeptide antigen. The polypeptide antigen of the kit may also be attached to a solid support.

[0341] In a more specific embodiment the detecting means of the above-described kit includes a solid support to which said polypeptide antigen is attached. Such a kit may also include a non-attached reporter-labeled anti-human antibody. In this embodiment, binding of the antibody to the polypeptide antigen can be detected by binding of the said reporter-labeled antibody.

[0342] In an additional embodiment, the invention includes a diagnostic kit for use in screening serum containing antigens of the polypeptide of the invention. The diagnostic kit includes a substantially isolated antibody specifically immunoreactive with polypeptide or polynucleotide antigens, and means for detecting the binding of the polynucleotide or polypeptide antigen to the antibody. In one embodiment, the antibody is attached to a solid support. In a specific embodiment, the antibody may be a monoclonal antibody. The detecting means of the kit may include a second, labeled monoclonal antibody. Alternatively, or in addition, the detecting means may include a labeled, competing antigen.

[0343] In one diagnostic configuration, test serum is reacted with a solid phase reagent having a surface-bound antigen obtained by the methods of the present invention. After binding with specific antigen antibody to the reagent and removing unbound serum components by washing, the reagent is reacted with reporter-labeled anti-human antibody to bind reporter to the reagent in proportion to the amount of bound anti-antigen antibody on the solid support. The reagent is again washed to remove unbound labeled antibody, and the amount of reporter associated with the reagent is determined. Typically, the reporter is an enzyme which is detected by incubating the solid phase in the presence of a suitable fluorometric, luminescent or calorimetric substrate (Sigma, St. Louis, Mo.).

[0344] The solid surface reagent in the above assay is prepared by known techniques for attaching protein material to solid support material, such as polymeric beads, dip sticks, 96-well plate or filter material. These attachment methods generally include non-specific adsorption of the protein to the support or covalent attachment of the protein, typically through a free amine group, to a chemically reactive group on the solid support, such as an activated carboxyl, hydroxyl, or aldehyde group. Alternatively, streptavidin coated plates can be used in conjunction with biotinylated antigen(s).

[0345] Thus, the invention provides an assay system or kit for carrying out this diagnostic method. The kit generally includes a support with surface- bound recombinant antigens, and a reporter-labeled anti-human antibody for detecting surface-bound anti-antigen antibody.

[0346] Uses of the Polynucleotides

[0347] Each of the polynucleotides identified herein can be used in numerous ways as reagents. The following description should be considered exemplary and utilizes known techniques.

[0348] The polynucleotides of the present invention are useful for chromosome identification. There exists an ongoing need to identify new chromosome markers, since few chromosome marking reagents, based on actual sequence data (repeat polymorphisms), are presently available. Each sequence is specifically targeted to and can hybridize with a particular location on an individual human chromosome, thus each polynucleotide of the present invention can routinely be used as a chromosome marker using techniques known in the art. Table 1A, column 9 provides the chromosome location of some of the polynucleotides of the invention.

[0349] Briefly, sequences can be mapped to chromosomes by preparing PCR primers (preferably at least 15 bp (e.g., 15-25 bp) from the sequences shown in SEQ ID NO:X. Primers can optionally be selected using computer analysis so that primers do not span more than one predicted exon in the genomic DNA. These primers are then used for PCR screening of somatic cell hybrids containing individual human chromosomes. Only those hybrids containing the human gene corresponding to SEQ ID NO:X will yield an amplified fragment.

[0350] Similarly, somatic hybrids provide a rapid method of PCR mapping the polynucleotides to particular chromosomes. Three or more clones can be assigned per day using a single thermal cycler. Moreover, sublocalization of the polynucleotides can be achieved with panels of specific chromosome fragments. Other gene mapping strategies that can be used include in situ hybridization, prescreening with labeled flow-sorted chromosomes, preselection by hybridization to construct chromosome specific-cDNA libraries, and computer mapping techniques (See, e.g., Shuler, Trends Biotechnol 16:456-459 (1998) which is hereby incorporated by reference in its entirety).

[0351] Precise chromosomal location of the polynucleotides can also be achieved using fluorescence in situ hybridization (FISH) of a metaphase chromosomal spread. This technique uses polynucleotides as short as 500 or 600 bases; however, polynucleotides 2,000-4,000 bp are preferred. For a review of this technique, see Verma et al., “Human Chromosomes: a Manual of Basic Techniques,” Pergamon Press, New York (1988).

[0352] For chromosome mapping, the polynucleotides can be used individually (to mark a single chromosome or a single site on that chromosome) or in panels (for marking multiple sites and/or multiple chromosomes).

[0353] Thus, the present invention also provides a method for chromosomal localization which involves (a) preparing PCR primers from the polynucleotide sequences in Table 1A and/or Table 2 and SEQ ID NO:X and (b) screening somatic cell hybrids containing individual chromosomes.

[0354] The polynucleotides of the present invention would likewise be useful for radiation hybrid mapping, HAPPY mapping, and long range restriction mapping. For a review of these techniques and others known in the art, see, e.g. Dear, “Genome Mapping: A Practical Approach,” IRL Press at Oxford University Press, London (1997); Aydin, J. Mol. Med. 77:691-694 (1999); Hacia et al., Mol. Psychiatry 3:483-492 (1998); Herrick et al., Chromosome Res. 7:409-423 (1999); Hamilton et al., Methods Cell Biol. 62:265-280 (2000); and/or Ott, J. Hered. 90:68-70 (1999) each of which is hereby incorporated by reference in its entirety.

[0355] Once a polynucleotide has been mapped to a precise chromosomal location, the physical position of the polynucleotide can be used in linkage analysis. Linkage analysis establishes coinheritance between a chromosomal location and presentation of a particular disease. (Disease mapping data are found, for example, in V. McKusick, Mendelian Inheritance in Man (available on line through Johns Hopkins University Welch Medical Library)). Column 10 of Table 1A provides an OMIM reference identification number of diseases associated with the cytologic band disclosed in column 9 of Table 1A, as determined using techniques described herein and by reference to Table 5. Assuming 1 megabase mapping resolution and one gene per 20 kb, a cDNA precisely localized to a chromosomal region associated with the disease could be one of 50-500 potential causative genes.

[0356] Thus, once coinheritance is established, differences in a polynucleotide of the invention and the corresponding gene between affected and unaffected individuals can be examined. First, visible structural alterations in the chromosomes, such as deletions or translocations, are examined in chromosome spreads or by PCR. If no structural alterations exist, the presence of point mutations are ascertained. Mutations observed in some or all affected individuals, but not in normal individuals, indicates that the mutation may cause the disease. However, complete sequencing of the polypeptide and the corresponding gene from several normal individuals is required to distinguish the mutation from a polymorphism. If a new polymorphism is identified, this polymorphic polypeptide can be used for further linkage analysis.

[0357] Furthermore, increased or decreased expression of the gene in affected individuals as compared to unaffected individuals can be assessed using the polynucleotides of the invention. Any of these alterations (altered expression, chromosomal rearrangement, or mutation) can be used as a diagnostic or prognostic marker. Diagnostic and prognostic methods, kits and reagents encompassed by the present invention are briefly described below and more thoroughly elsewhere herein (see e.g., the sections labeled “Antibodies”, “Diagnostic Assays”, and “Methods for Detecting Diseases”).

[0358] Thus, the invention also provides a diagnostic method useful during diagnosis of a disorder, involving measuring the expression level of polynucleotides of the present invention in cells or body fluid from an individual and comparing the measured gene expression level with a standard level of polynucleotide expression level, whereby an increase or decrease in the gene expression level compared to the standard is indicative of a disorder. Additional non-limiting examples of diagnostic methods encompassed by the present invention are more thoroughly described elsewhere herein (see, e.g., Example 12).

[0359] In still another embodiment, the invention includes a kit for analyzing samples for the presence of proliferative and/or cancerous polynucleotides derived from a test subject. In a general embodiment, the kit includes at least one polynucleotide probe containing a nucleotide sequence that will specifically hybridize with a polynucleotide of the invention and a suitable container. In a specific embodiment, the kit includes two polynucleotide probes defining an internal region of the polynucleotide of the invention, where each probe has one strand containing a 31′mer-end internal to the region. In a further embodiment, the probes may be useful as primers for polymerase chain reaction amplification.

[0360] Where a diagnosis of a related disorder, including, for example, diagnosis of a tumor, has already been made according to conventional methods, the present invention is useful as a prognostic indicator, whereby patients exhibiting enhanced or depressed polynucleotide of the invention expression will experience a worse clinical outcome relative to patients expressing the gene at a level nearer the standard level.

[0361] By “measuring the expression level of polynucleotides of the invention” is intended qualitatively or quantitatively measuring or estimating the level of the polypeptide of the invention or the level of the mRNA encoding the polypeptide of the invention in a first biological sample either directly (e.g., by determining or estimating absolute protein level or mRNA level) or relatively (e.g., by comparing to the polypeptide level or mRNA level in a second biological sample). Preferably, the polypeptide level or mRNA level in the first biological sample is measured or estimated and compared to a standard polypeptide level or mRNA level, the standard being taken from a second biological sample obtained from an individual not having the related disorder or being determined by averaging levels from a population of individuals not having a related disorder. As will be appreciated in the art, once a standard polypeptide level or mRNA level is known, it can be used repeatedly as a standard for comparison.

[0362] By “biological sample” is intended any biological sample obtained from an individual, body fluid, cell line, tissue culture, or other source which contains polypeptide of the present invention or the corresponding mRNA. As indicated, biological samples include body fluids (such as semen, lymph, vaginal pool, sera, plasma, urine, synovial fluid and spinal fluid) which contain the polypeptide of the present invention, and tissue sources found to express the polypeptide of the present invention. Methods for obtaining tissue biopsies and body fluids from mammals are well known in the art. Where the biological sample is to include mRNA, a tissue biopsy is the preferred source.

[0363] The method(s) provided above may preferably be applied in a diagnostic method and/or kits in which polynucleotides and/or polypeptides of the invention are attached to a solid support. In one exemplary method, the support may be a “gene chip” or a “biological chip” as described in U.S. Pat. Nos. 5,837,832, 5,874,219, and 5,856,174. Further, such a gene chip with polynucleotides of the invention attached may be used to identify polymorphisms between the isolated polynucleotide sequences of the invention, with polynucleotides isolated from a test subject. The knowledge of such polymorphisms (i.e. their location, as well as, their existence) would be beneficial in identifying disease loci for many disorders, such as for example, in neural disorders, immune system disorders, muscular disorders, reproductive disorders, gastrointestinal disorders, pulmonary disorders, digestive disorders, metabolic disorders, cardiovascular disorders, renal disorders, proliferative disorders, and/or cancerous diseases and conditions. Such a method is described in U.S. Pat. Nos. 5,858,659 and 5,856,104. The U.S. patents referenced supra are hereby incorporated by reference in their entirety herein.

[0364] The present invention encompasses polynucleotides of the present invention that are chemically synthesized, or reproduced as peptide nucleic acids (PNA), or according to other methods known in the art. The use of PNAs would serve as the preferred form if the polynucleotides of the invention are incorporated onto a solid support, or gene chip. For the purposes of the present invention, a peptide nucleic acid (PNA) is a polyamide type of DNA analog and the monomeric units for adenine, guanine, thymine and cytosine are available commercially (Perceptive Biosystems). Certain components of DNA, such as phosphorus, phosphorus oxides, or deoxyribose derivatives, are not present in PNAs. As disclosed by Nielsen et al., Science 254, 1497 (1991); and Egholm et al., Nature 365, 666 (1993), PNAs bind specifically and tightly to complementary DNA strands and are not degraded by nucleases. In fact, PNA binds more strongly to DNA than DNA itself does. This is probably because there is no electrostatic repulsion between the two strands, and also the polyamide backbone is more flexible. Because of this, PNA/DNA duplexes bind under a wider range of stringency conditions than DNA/DNA duplexes, making it easier to perform multiplex hybridization. Smaller probes can be used than with DNA due to the strong binding. In addition, it is more likely that single base mismatches can be determined with PNA/DNA hybridization because a single mismatch in a PNA/DNA 15-mer lowers the melting point (T.sub.m) by 8°-20° C., vs. 4°-16° C. for the DNA/DNA 15-mer duplex. Also, the absence of charge groups in PNA means that hybridization can be done at low ionic strengths and reduce possible interference by salt during the analysis.

[0365] The compounds of the present invention have uses which include, but are not limited to, detecting cancer in mammals. In particular the invention is useful during diagnosis of pathological cell proliferative neoplasias which include, but are not limited to: acute myelogenous leukemias including acute monocytic leukemia, acute myeloblastic leukemia, acute promyelocytic leukemia, acute myelomonocytic leukemia, acute erythroleukemia, acute megakaryocytic leukemia, and acute undifferentiated leukemia, etc.; and chronic myelogenous leukemias including chronic myelomonocytic leukemia, chronic granulocytic leukemia, etc. Preferred mammals include monkeys, apes, cats, dogs, cows, pigs, horses, rabbits and humans. Particularly preferred are humans.

[0366] Pathological cell proliferative disorders are often associated with inappropriate activation of proto-oncogenes. (Gelmann, E. P. et al., “The Etiology of Acute Leukemia: Molecular Genetics and Viral Oncology,” in Neoplastic Diseases of the Blood, Vol 1., Wiernik, P. H. et al. eds., 161-182 (1985)). Neoplasias are now believed to result from the qualitative alteration of a normal cellular gene product, or from the quantitative modification of gene expression by insertion into the chromosome of a viral sequence, by chromosomal translocation of a gene to a more actively transcribed region, or by some other mechanism. (Gelmann et al., supra) It is likely that mutated or altered expression of specific genes is involved in the pathogenesis of some leukemias, among other tissues and cell types. (Gelmann et al., supra) Indeed, the human counterparts of the oncogenes involved in some animal neoplasias have been amplified or translocated in some cases of human leukemia and carcinoma. (Gelmann et al., supra)

[0367] For example, c-myc expression is highly amplified in the non-lymphocytic leukemia cell line HL-60. When HL-60 cells are chemically induced to stop proliferation, the level of c-myc is found to be downregulated. (International Publication Number WO 91/15580). However, it has been shown that exposure of HL-60 cells to a DNA construct that is complementary to the 5′ end of c-myc or c-myb blocks translation of the corresponding mRNAs which downregulates expression of the c-myc or c-myb proteins and causes arrest of cell proliferation and differentiation of the treated cells. (International Publication Number WO 91/15580; Wickstrom et al., Proc. Natl. Acad. Sci. 85:1028 (1988); Anfossi et al., Proc. Natl. Acad. Sci. 86:3379 (1989)). However, the skilled artisan would appreciate the present invention's usefulness is not be limited to treatment, prevention, and/or prognosis of proliferative disorders of cells and tissues of hematopoietic origin, in light of the numerous cells and cell types of varying origins which are known to exhibit proliferative phenotypes.

[0368] In addition to the foregoing, a polynucleotide of the present invention can be used to control gene expression through triple helix formation or through antisense DNA or RNA. Antisense techniques are discussed, for example, in Okano, J. Neurochem. 56: 560 (1991); “Oligodeoxynucleotides as Antisense Inhibitors of Gene Expression, CRC Press, Boca Raton, Fla. (1988). Triple helix formation is discussed in, for instance Lee et al., Nucleic Acids Research 6: 3073 (1979); Cooney et al., Science 241: 456 (1988); and Dervan et al., Science 251: 1360 (1991). Both methods rely on binding of the polynucleotide to a complementary DNA or RNA. For these techniques, preferred polynucleotides are usually oligonucleotides 20 to 40 bases in length and complementary to either the region of the gene involved in transcription (triple helix—see Lee et al., Nucl. Acids Res. 6:3073 (1979); Cooney et al., Science 241:456 (1988); and Dervan et al., Science 251:1360 (1991)) or to the mRNA itself (antisense—Okano, J. Neurochem. 56:560 (1991); Oligodeoxy-nucleotides as Antisense Inhibitors of Gene Expression, CRC Press, Boca Raton, Fla. (1988)). Triple helix formation optimally results in a shut-off of RNA transcription from DNA, while antisense RNA hybridization blocks translation of an mRNA molecule into polypeptide. The oligonucleotide described above can also be delivered to cells such that the antisense RNA or DNA may be expressed in vivo to inhibit production of polypeptide of the present invention antigens. Both techniques are effective in model systems, and the information disclosed herein can be used to design antisense or triple helix polynucleotides in an effort to treat disease, and in particular, for the treatment of proliferative diseases and/or conditions. Non-limiting antisense and triple helix methods encompassed by the present invention are more thoroughly described elsewhere herein (see, e.g., the section labeled “Antisense and Ribozyme (Antagonists)”).

[0369] Polynucleotides of the present invention are also useful in gene therapy. One goal of gene therapy is to insert a normal gene into an organism having a defective gene, in an effort to correct the genetic defect. The polynucleotides disclosed in the present invention offer a means of targeting such genetic defects in a highly accurate manner. Another goal is to insert a new gene that was not present in the host genome, thereby producing a new trait in the host cell. Additional non-limiting examples of gene therapy methods encompassed by the present invention are more thoroughly described elsewhere herein (see, e.g., the sections labeled “Gene Therapy Methods”, and Examples 16, 17 and 18).

[0370] The polynucleotides are also useful for identifying individuals from minute biological samples. The United States military, for example, is considering the use of restriction fragment length polymorphism (RFLP) for identification of its personnel. In this technique, an individual's genomic DNA is digested with one or more restriction enzymes, and probed on a Southern blot to yield unique bands for identifying personnel. This method does not suffer from the current limitations of “Dog Tags” which can be lost, switched, or stolen, making positive identification difficult. The polynucleotides of the present invention can be used as additional DNA markers for RFLP.

[0371] The polynucleotides of the present invention can also be used as an alternative to RFLP, by determining the actual base-by-base DNA sequence of selected portions of an individual's genome. These sequences can be used to prepare PCR primers for amplifying and isolating such selected DNA, which can then be sequenced. Using this technique, individuals can be identified because each individual will have a unique set of DNA sequences. Once an unique ID database is established for an individual, positive identification of that individual, living or dead, can be made from extremely small tissue samples.

[0372] Forensic biology also benefits from using DNA-based identification techniques as disclosed herein. DNA sequences taken from very small biological samples such as tissues, e.g., hair or skin, or body fluids, e.g., blood, saliva, semen, synovial fluid, amniotic fluid, breast milk, lymph, pulmonary sputum or surfactant, urine, fecal matter, etc., can be amplified using PCR. In one prior art technique, gene sequences amplified from polymorphic loci, such as DQa class II HLA gene, are used in forensic biology to identify individuals. (Erlich, H., PCR Technology, Freeman and Co. (1992)). Once these specific polymorphic loci are amplified, they are digested with one or more restriction enzymes, yielding an identifying set of bands on a Southern blot probed with DNA corresponding to the DQa class II HLA gene. Similarly, polynucleotides of the present invention can be used as polymorphic markers for forensic purposes.

[0373] There is also a need for reagents capable of identifying the source of a particular tissue. Such need arises, for example, in forensics when presented with tissue of unknown origin. Appropriate reagents can comprise, for example, DNA probes or primers prepared from the sequences of the present invention, specific to tissues, including but not limited to those shown in Table 1A. Panels of such reagents can identify tissue by species and/or by organ type. In a similar fashion, these reagents can be used to screen tissue cultures for contamination. Additional non-limiting examples of such uses are further described herein.

[0374] The polynucleotides of the present invention are also useful as hybridization probes for differential identification of the tissue(s) or cell type(s) present in a biological sample. Similarly, polypeptides and antibodies directed to polypeptides of the present invention are useful to provide immunological probes for differential identification of the tissue(s) (e.g., immunohistochemistry assays) or cell type(s) (e.g., immunocytochemistry assays). In addition, for a number of disorders of the above tissues or cells, significantly higher or lower levels of gene expression of the polynucleotides/polypeptides of the present invention may be detected in certain tissues (e.g., tissues expressing polypeptides and/or polynucleotides of the present invention, for example, those disclosed in column 8 of Table 1A, and/or cancerous and/or wounded tissues) or bodily fluids (e.g., semen, lymph, vaginal pool, serum, plasma, urine, synovial fluid or spinal fluid) taken from an individual having such a disorder, relative to a “standard” gene expression level, i.e., the expression level in healthy tissue from an individual not having the disorder.

[0375] Thus, the invention provides a diagnostic method of a disorder, which involves: (a) assaying gene expression level in cells or body fluid of an individual; (b) comparing the gene expression level with a standard gene expression level, whereby an increase or decrease in the assayed gene expression level compared to the standard expression level is indicative of a disorder.

[0376] In the very least, the polynucleotides of the present invention can be used as molecular weight markers on Southern gels, as diagnostic probes for the presence of a specific mRNA in a particular cell type, as a probe to “subtract-out” known sequences in the process of discovering novel polynucleotides, for selecting and making oligomers for attachment to a “gene chip” or other support, to raise anti-DNA antibodies using DNA immunization techniques, and as an antigen to elicit an immune response.

[0377] Uses of the Polypeptides

[0378] Each of the polypeptides identified herein can be used in numerous ways. The following description should be considered exemplary and utilizes known techniques.

[0379] Polypeptides and antibodies directed to polypeptides of the present invention are useful to provide immunological probes for differential identification of the tissue(s) (e.g., immunohistochemistry assays such as, for example, ABC immunoperoxidase (Hsu et al., J. Histochem. Cytochem. 29:577-580 (1981)) or cell type(s) (e.g., immunocytochemistry assays).

[0380] Antibodies can be used to assay levels of polypeptides encoded by polynucleotides of the invention in a biological sample using classical immunohistological methods known to those of skill in the art (e.g., see Jalkanen, et al., J. Cell. Biol. 101:976-985 (1985); Jalkanen, et al., J. Cell. Biol. 105:3087-3096 (1987)). Other antibody-based methods useful for detecting protein gene expression include immunoassays, such as the enzyme linked immunosorbent assay (ELISA) and the radioimmunoassay (RIA). Suitable antibody assay labels are known in the art and include enzyme labels, such as, glucose oxidase; radioisotopes, such as iodine (¹³¹I, ¹²⁵I, ¹²³I, ¹²¹I), carbon (¹⁴C), sulfur (³⁵S), tritium (³H), indium (^{115m}In, ^{113m}In, ¹¹²In, ¹¹¹In), and technetium (⁹⁹Tc, ^{99m}Tc), thallium (²⁰¹Ti), gallium (⁶⁸Ga, ⁶⁷Ga), palladium (¹⁰³Pd), molybdenum (⁹⁹Mo), xenon (¹³³Xe), fluorine (¹8F), ¹⁵³sM, ¹⁷⁷Lu, ¹⁵⁹Gd, ¹⁴⁹Pm, ¹⁴⁰La, ¹⁷⁵Yb, ¹⁶⁶Ho, ⁹⁰Y, ⁴⁷SC, ¹⁸⁶Re, ¹⁸⁸Re, ¹⁴²Pr, ¹⁰⁵Rh, ⁹⁷Ru; luminescent labels, such as luminol; and fluorescent labels, such as fluorescein and rhodamine, and biotin.

[0381] In addition to assaying levels of polypeptide of the present invention in a biological sample, proteins can also be detected in vivo by imaging. Antibody labels or markers for in vivo imaging of protein include those detectable by X-radiography, NMR or ESR. For X-radiography, suitable labels include radioisotopes such as barium or cesium, which emit detectable radiation but are not overtly harmful to the subject. Suitable markers for NMR and ESR include those with a detectable characteristic spin, such as deuterium, which may be incorporated into the antibody by labeling of nutrients for the relevant hybridoma.

[0382] A protein-specific antibody or antibody fragment which has been labeled with an appropriate detectable imaging moiety, such as a radioisotope (for example, ¹³¹I, ¹¹²In, ^{99m}Tc, (¹³¹I, ¹²⁵I, ¹²³I, ¹²¹I), carbon (¹⁴C), sulfur (³⁵S), tritium (³H), indium (^{115m}In, ^{113m}In, ¹¹²In, ¹¹¹In), and technetium (⁹⁹Tc, ^{99m}Tc), thallium (²⁰¹Ti), gallium (⁶⁸Ga, ⁶⁷Ga), palladium (¹⁰³Pd), molybdenum (⁹⁹Mo), xenon (¹³³Xe), fluorine (¹⁸F, ¹⁵³Sm, ¹⁷⁷Lu, ¹⁵⁹Gd, ¹⁴⁹Pm ¹⁴⁰La, ¹⁷⁵Yb, ¹⁶⁶Ho, ⁹⁰Y, ⁴⁷Sc, ¹⁸⁶Re, ¹⁸⁸Re, ¹⁴²Pr, ¹⁰⁵Rh, ⁹⁷Ru), a radio-opaque substance, or a material detectable by nuclear magnetic resonance, is introduced (for example, parenterally, subcutaneously or intraperitoneally) into the mammal to be examined for immune system disorder. It will be understood in the art that the size of the subject and the imaging system used will determine the quantity of imaging moiety needed to produce diagnostic images. In the case of a radioisotope moiety, for a human subject, the quantity of radioactivity injected will normally range from about 5 to 20 millicuries of ^{99m}Tc. The labeled antibody or antibody fragment will then preferentially accumulate at the location of cells which express the polypeptide encoded by a polynucleotide of the invention. In vivo tumor imaging is described in S. W. Burchiel et al., “Immunopharmacokinetics of Radiolabeled Antibodies and Their Fragments” (Chapter 13 in Tumor Imaging. The Radiochemical Detection of Cancer, S. W. Burchiel and B. A. Rhodes, eds., Masson Publishing Inc. (1982)).

[0383] In one embodiment, the invention provides a method for the specific delivery of compositions of the invention to cells by administering polypeptides of the invention (e.g., polypeptides encoded by polynucleotides of the invention and/or antibodies) that are associated with heterologous polypeptides or nucleic acids. In one example, the invention provides a method for delivering a therapeutic protein into the targeted cell. In another example, the invention provides a method for delivering a single stranded nucleic acid (e.g., antisense or ribozymes) or double stranded nucleic acid (e.g., DNA that can integrate into the cell's genome or replicate episomally and that can be transcribed) into the targeted cell.

[0384] In another embodiment, the invention provides a method for the specific destruction of cells (e.g., the destruction of tumor cells) by administering polypeptides of the invention in association with toxins or cytotoxic prodrugs.

[0385] By “toxin” is meant one or more compounds that bind and activate endogenous cytotoxic effector systems, radioisotopes, holotoxins, modified toxins, catalytic subunits of toxins, or any molecules or enzymes not normally present in or on the surface of a cell that under defined conditions cause the cell's death. Toxins that may be used according to the methods of the invention include, but are not limited to, radioisotopes known in the art, compounds such as, for example, antibodies (or complement fixing containing portions thereof) that bind an inherent or induced endogenous cytotoxic effector system, thymidine kinase, endonuclease, RNAse, alpha toxin, ricin, abrin, Pseudomonas exotoxin A, diphtheria toxin, saporin, momordin, gelonin, pokeweed antiviral protein, alpha-sarcin and cholera toxin. “Toxin” also includes a cytostatic or cytocidal agent, a therapeutic agent or a radioactive metal ion, e.g., alpha-emitters such as, for example, Bi, or other radioisotopes such as, for example, ¹⁰³Pd, ¹³³Xe, ¹³¹I, ⁶⁸Ge, ⁵⁷Co ⁶⁵Zn, ⁸⁵Sr, ³²P, ³⁵S, ⁹⁰Y, ¹⁵³Sm, ¹⁵³Gd, ¹⁶⁹Yb, ⁵Cr, ⁴Mn ⁷⁵Se ¹¹³Sn, ⁹⁰Yttrium, ¹¹⁷Tin, ¹⁸⁶Rhenium, ¹⁶⁶Holmium, and ¹⁸⁸Rhenium; luminescent labels, such as luminol; and fluorescent labels, such as fluorescein and rhodamine, and biotin. In a specific embodiment, the invention provides a method for the specific destruction of cells (e.g., the destruction of tumor cells) by administering polypeptides of the invention or antibodies of the invention in association with the radioisotope ⁹⁰Y. In another specific embodiment, the invention provides a method for the specific destruction of cells (e.g., the destruction of tumor cells) by administering polypeptides of the invention or antibodies of the invention in association with the radioisotope ¹¹¹In. In a further specific embodiment, the invention provides a method for the specific destruction of cells (e.g., the destruction of tumor cells) by administering polypeptides of the invention or antibodies of the invention in association with the radioisotope ¹³¹I.

[0386] Techniques known in the art may be applied to label polypeptides of the invention (including antibodies). Such techniques include, but are not limited to, the use of bifunctional conjugating agents (see e.g., U.S. Pat. Nos. 5,756,065; 5,714,631; 5,696,239; 5,652,361; 5,505,931; 5,489,425; 5,435,990; 5,428,139; 5,342,604; 5,274,119; 4,994,560; and 5,808,003; the contents of each of which are hereby incorporated by reference in its entirety).

[0387] Thus, the invention provides a diagnostic method of a disorder, which involves (a) assaying the expression level of a polypeptide of the present invention in cells or body fluid of an individual; and (b) comparing the assayed polypeptide expression level with a standard polypeptide expression level, whereby an increase or decrease in the assayed polypeptide expression level compared to the standard expression level is indicative of a disorder. With respect to cancer, the presence of a relatively high amount of transcript in biopsied tissue from an individual may indicate a predisposition for the development of the disease, or may provide a means for detecting the disease prior to the appearance of actual clinical symptoms. A more definitive diagnosis of this type may allow health professionals to employ preventative measures or aggressive treatment earlier thereby preventing the development or flrther progression of the cancer.

[0388] Moreover, polypeptides of the present invention can be used to treat or prevent diseases or conditions such as, for example, neural disorders, immune system disorders, muscular disorders, reproductive disorders, gastrointestinal disorders, pulmonary disorders, cardiovascular disorders, renal disorders, proliferative disorders, and/or cancerous diseases and conditions. For example, patients can be administered a polypeptide of the present invention in an effort to replace absent or decreased levels of the polypeptide (e.g., insulin), to supplement absent or decreased levels of a different polypeptide (e.g., hemoglobin S for hemoglobin B, SOD, catalase, DNA repair proteins), to inhibit the activity of a polypeptide (e.g., an oncogene or tumor supressor), to activate the activity of a polypeptide (e.g., by binding to a receptor), to reduce the activity of a membrane bound receptor by competing with it for free ligand (e.g., soluble TNF receptors used in reducing inflammation), or to bring about a desired response (e.g., blood vessel growth inhibition, enhancement of the immune response to proliferative cells or tissues).

[0389] Similarly, antibodies directed to a polypeptide of the present invention can also be used to treat disease (as described supra, and elsewhere herein). For example, administration of an antibody directed to a polypeptide of the present invention can bind, and/or neutralize the polypeptide, and/or reduce overproduction of the polypeptide. Similarly, administration of an antibody can activate the polypeptide, such as by binding to a polypeptide bound to a membrane (receptor).

[0390] At the very least, the polypeptides of the present invention can be used as molecular weight markers on SDS-PAGE gels or on molecular sieve gel filtration columns using methods well known to those of skill in the art. Polypeptides can also be used to raise antibodies, which in turn are used to measure protein expression from a recombinant cell, as a way of assessing transformation of the host cell. Moreover, the polypeptides of the present invention can be used to test the biological activities described herein.

[0391] Diagnostic Assays

[0392] The compounds of the present invention are useful for diagnosis, treatment, prevention and/or prognosis of various disorders in mammals, preferably humans. Such disorders include, but are not limited to, those described herein under the section heading “Biological Activities”.

[0393] For a number of disorders, substantially altered (increased or decreased) levels of gene expression can be detected in tissues, cells or bodily fluids (e.g., sera, plasma, urine, semen, synovial fluid or spinal fluid) taken from an individual having such a disorder, relative to a “standard” gene expression level, that is, the expression level in tissues or bodily fluids from an individual not having the disorder. Thus, the invention provides a diagnostic method useful during diagnosis of a disorder, which involves measuring the expression level of the gene encoding the polypeptide in tissues, cells or body fluid from an individual and comparing the measured gene expression level with a standard gene expression level, whereby an increase or decrease in the gene expression level(s) compared to the standard is indicative of a disorder. These diagnostic assays may be performed in vivo or in vitro, such as, for example, on blood samples, biopsy tissue or autopsy tissue.

[0394] The present invention is also useful as a prognostic indicator, whereby patients exhibiting enhanced or depressed gene expression will experience a worse clinical outcome relative to patients expressing the gene at a level nearer the standard level.

[0395] In certain embodiments, a polypeptide of the invention, or polynucleotides, antibodies, agonists, or antagonists corresponding to that polypeptide, may be used to diagnose and/or prognose diseases and/or disorders associated with the tissue(s) in which the polypeptide of the invention is expressed, including one, two, three, four, five, or more tissues disclosed in Table 1A, column 8 (Tissue Distribution Library Code).

[0396] By “assaying the expression level of the gene encoding the polypeptide” is intended qualitatively or quantitatively measuring or estimating the level of the polypeptide of the invention or the level of the mRNA encoding the polypeptide of the invention in a first biological sample either directly (e.g., by determining or estimating absolute protein level or mRNA level) or relatively (e.g., by comparing to the polypeptide level or mRNA level in a second biological sample). Preferably, the polypeptide expression level or mRNA level in the first biological sample is measured or estimated and compared to a standard polypeptide level or mRNA level, the standard being taken from a second biological sample obtained from an individual not having the disorder or being determined by averaging levels from a population of individuals not having the disorder. As will be appreciated in the art, once a standard polypeptide level or mRNA level is known, it can be used repeatedly as a standard for comparison.

[0397] By “biological sample” is intended any biological sample obtained from an individual, cell line, tissue culture, or other source containing polypeptides of the invention (including portions thereof) or mRNA. As indicated, biological samples include body fluids (such as sera, plasma, urine, synovial fluid and spinal fluid) and tissue sources found to express the full length or fragments thereof of a polypeptide or mRNA. Methods for obtaining tissue biopsies and body fluids from mammals are well known in the art. Where the biological sample is to include mRNA, a tissue biopsy is the preferred source.

[0398] Total cellular RNA can be isolated from a biological sample using any suitable technique such as the single-step guanidinium-thiocyanate-phenol-chloroform method described in Chomczynski and Sacchi, Anal. Biochem. 162:156-159 (1987). Levels of mRNA encoding the polypeptides of the invention are then assayed using any appropriate method. These include Northern blot analysis, SI nuclease mapping, the polymerase chain reaction (PCR), reverse transcription in combination with the polymerase chain reaction (RT-PCR), and reverse transcription in combination with the ligase chain reaction (RT-LCR).

[0399] The present invention also relates to diagnostic assays such as quantitative and diagnostic assays for detecting levels of polypeptides of the invention, in a biological sample (e.g., cells and tissues), including determination of normal and abnormal levels of polypeptides. Thus, for instance, a diagnostic assay in accordance with the invention for detecting over-expression of polypeptides of the invention compared to normal control tissue samples may be used to detect the presence of tumors. Assay techniques that can be used to determine levels of a polypeptide, such as a polypeptide of the present invention in a sample derived from a host are well-known to those of skill in the art. Such assay methods include radioimmunoassays, competitive-binding assays, Western Blot analysis and ELISA assays. Assaying polypeptide levels in a biological sample can occur using any art-known method.

[0400] Assaying polypeptide levels in a biological sample can occur using antibody-based techniques. For example, polypeptide expression in tissues can be studied with classical immunohistological methods (Jalkanen et al., J. Cell. Biol. 101:976-985 (1985); Jalkanen, M., et al., J. Cell. Biol. 105:3087-3096 (1987)). Other antibody-based methods useful for detecting polypeptide gene expression include immunoassays, such as the enzyme linked immunosorbent assay (ELISA) and the radioimmunoassay (RIA). Suitable antibody assay labels are known in the art and include enzyme labels, such as, gucose oxidase, and radioisotopes, such as iodine (¹²⁵I, ¹²¹I), carbon (¹⁴C), sulfur (³⁵S), tritium (³H), indium (¹¹²In), and technetium (^{99m}Tc), and fluorescent labels, such as fluorescein and rhodamine, and biotin.

[0401] The tissue or cell type to be analyzed will generally include those which are known, or suspected, to express the gene of inteest (such as, for example, cancer). The protein isolation methods employed herein may, for example, be such as those described in Harlow and Lane (Harlow, E. and Lane, D., 1988, “Antibodies: A Laboratory Manual”, Cold Spring Harbor Laboratory Press, Cold Spring Harbor, N.Y.), which is incorporated herein by reference in its entirety. The isolated cells can be derived from cell culture or from a patient. The analysis of cells taken from culture may be a necessary step in the assessment of cells that could be used as part of a cell-based gene therapy technique or, alternatively, to test the effect of compounds on the expression of the gene.

[0402] For example, antibodies, or fragments of antibodies, such as those described herein, may be used to quantitatively or qualitatively detect the presence of gene products or conserved variants or peptide fragments thereof. This can be accomplished, for example, by immunofluorescence techniques employing a fluorescently labeled antibody coupled with light microscopic, flow cytometric, or fluorimetric detection.

[0403] In a preferred embodiment, antibodies, or fragments of antibodies directed to any one or all of the predicted epitope domains of the polypeptides of the invention (shown in column 7 of Table 1A) may be used to quantitatively or qualitatively detect the presence of gene products or conserved variants or peptide fragments thereof. This can be accomplished, for example, by immunofluorescence techniques employing a fluorescently labeled antibody coupled with light microscopic, flow cytometric, or fluorimetric detection.

[0404] In an additional preferred embodiment, antibodies, or fragments of antibodies directed to a conformational epitope of a polypeptide of the invention may be used to quantitatively or qualitatively detect the presence of gene products or conserved variants or peptide fragments thereof. This can be accomplished, for example, by immunofluorescence techniques employing a fluorescently labeled antibody coupled with light microscopic, flow cytometric, or fluorimetric detection.

[0405] The antibodies (or fragments thereof), and/or polypeptides of the present invention may, additionally, be employed histologically, as in immunofluorescence, immunoelectron microscopy or non-immunological assays, for in situ detection of gene products or conserved variants or peptide fragments thereof. In situ detection may be accomplished by removing a histological specimen from a patient, and applying thereto a labeled antibody or polypeptide of the present invention. The antibody (or fragment thereof) or polypeptide is preferably applied by overlaying the labeled antibody (or fragment) onto a biological sample. Through the use of such a procedure, it is possible to determine not only the presence of the gene product, or conserved variants or peptide fragments, or polypeptide binding, but also its distribution in the examined tissue. Using the present invention, those of ordinary skill will readily perceive that any of a wide variety of histological methods (such as staining procedures) can be modified in order to achieve such in situ detection.

[0406] Immunoassays and non-immunoassays for gene products or conserved variants or peptide fragments thereof will typically comprise incubating a sample, such as a biological fluid, a tissue extract, freshly harvested cells, or lysates of cells which have been incubated in cell culture, in the presence of a detectably labeled antibody capable of binding gene products or conserved variants or peptide fragments thereof, and detecting the bound antibody by any of a number of techniques well-known in the art.

[0407] The biological sample may be brought in contact with and immobilized onto a solid phase support or carrier such as nitrocellulose, or other solid support which is capable of immobilizing cells, cell particles or soluble proteins. The support may then be washed with suitable buffers followed by treatment with the detectably labeled antibody or detectable polypeptide of the invention. The solid phase support may then be washed with the buffer a second time to remove unbound antibody or polypeptide. Optionally the antibody is subsequently labeled. The amount of bound label on solid support may then be detected by conventional means.

[0408] By “solid phase support or carrier” is intended any support capable of binding an antigen or an antibody. Well-known supports or carriers include glass, polystyrene, polypropylene, polyethylene, dextran, nylon, amylases, natural and modified celluloses, polyacrylamides, gabbros, and magnetite. The nature of the carrier can be either soluble to some extent or insoluble for the purposes of the present invention. The support material may have virtually any possible structural configuration so long as the coupled molecule is capable of binding to an antigen or antibody. Thus, the support configuration may be spherical, as in a bead, or cylindrical, as in the inside surface of a test tube, or the external surface of a rod. Alternatively, the surface may be flat such as a sheet, test strip, etc. Preferred supports include polystyrene beads. Those skilled in the art will know many other suitable carriers for binding antibody or antigen, or will be able to ascertain the same by use of routine experimentation.

[0409] The binding activity of a given lot of antibody or antigen polypeptide may be determined according to well known methods. Those skilled in the art will be able to determine operative and optimal assay conditions for each determination by employing routine experimentation.

[0410] In addition to assaying polypeptide levels or polynucleotide levels in a biological sample obtained from an individual, polypeptide or polynucleotide can also be detected in vivo by imaging. For example, in one embodiment of the invention, polypeptides and/or antibodies of the invention are used to image diseased cells, such as neoplasms. In another embodiment, polynucleotides of the invention (e.g., polynucleotides complementary to all or a portion of an mRNA) and/or antibodies (e.g., antibodies directed to any one or a combination of the epitopes of a polypeptide of the invention, antibodies directed to a conformational epitope of a polypeptide of the invention, or antibodies directed to the full length polypeptide expressed on the cell surface of a mammalian cell) are used to image diseased or neoplastic cells.

[0411] Antibody labels or markers for in vivo imaging of polypeptides of the invention include those detectable by X-radiography, NMR, MRI, CAT-scans or ESR. For X-radiography, suitable labels include radioisotopes such as barium or cesium, which emit detectable radiation but are not overtly harmful to the subject. Suitable markers for NMR and ESR include those with a detectable characteristic spin, such as deuterium, which may be incorporated into the antibody by labeling of nutrients for the relevant hybridoma. Where in vivo imaging is used to detect enhanced levels of polypeptides for diagnosis in humans, it may be preferable to use human antibodies or “humanized” chimeric monoclonal antibodies. Such antibodies can be produced using techniques described herein or otherwise known in the art. For example methods for producing chimeric antibodies are known in the art. See, for review, Morrison, Science 229:1202 (1985); Oi et al., BioTechniques 4:214 (1986); Cabilly et al., U.S. Pat. No. 4,816,567; Taniguchi et al., EP 171496; Morrison et al., EP 173494; Neuberger et al., WO 8601533; Robinson et al., WO 8702671; Boulianne et al., Nature 312:643 (1984); Neuberger et al., Nature 314:268 (1985).

[0412] Additionally, any polypeptides of the invention whose presence can be detected, can be administered. For example, polypeptides of the invention labeled with a radio-opaque or other appropriate compound can be administered and visualized in vivo, as discussed, above for labeled antibodies. Further, such polypeptides can be utilized for in vitro diagnostic procedures.

[0413] A polypeptide-specific antibody or antibody fragment which has been labeled with an appropriate detectable imaging moiety, such as a radioisotope (for example, ¹³¹I, ¹¹²In, ^{99m}Tc), a radio-opaque substance, or a material detectable by nuclear magnetic resonance, is introduced (for example, parenterally, subcutaneously or intraperitoneally) into the mammal to be examined for a disorder. It will be understood in the art that the size of the subject and the imaging system used will determine the quantity of imaging moiety needed to produce diagnostic images. In the case of a radioisotope moiety, for a human subject, the quantity of radioactivity injected will normally range from about 5 to 20 millicuries of ^{99m}Tc. The labeled antibody or antibody fragment will then preferentially accumulate at the location of cells which contain the antigenic protein. In vivo tumor imaging is described in S. W. Burchiel et al., “Immunopharmacokinetics of Radiolabeled Antibodies and Their Fragments” (Chapter 13 in Tumor Imaging: The Radiochemical Detection of Cancer, S. W. Burchiel and B. A. Rhodes, eds., Masson Publishing Inc. (1982)).

[0414] With respect to antibodies, one of the ways in which an antibody of the present invention can be detectably labeled is by linking the same to a reporter enzyme and using the linked product in an enzyme immunoassay (EIA) (Voller, A., “The Enzyme Linked Immunosorbent Assay (ELISA)”, 1978, Diagnostic Horizons 2:1-7, Microbiological Associates Quarterly Publication, Walkersville, Md.); Voller et al., J. Clin. Pathol. 31:507-520 (1978); Butler, J. E., Meth. Enzymol. 73:482-523 (1981); Maggio, E. (ed.), 1980, Enzyme Immunoassay, CRC Press, Boca Raton, FL,; Ishikawa, E. et al., (eds.), 1981, Enzyme Immunoassay, Kgaku Shoin, Tokyo). The reporter enzyme which is bound to the antibody will react with an appropriate substrate, preferably a chromogenic substrate, in such a manner as to produce a chemical moiety which can be detected, for example, by spectrophotometric, fluorimetric or by visual means. Reporter enzymes which can be used to detectably label the antibody include, but are not limited to, malate dehydrogenase, staphylococcal nuclease, delta-5-steroid isomerase, yeast alcohol dehydrogenase, alpha-glycerophosphate, dehydrogenase, triose phosphate isomerase, horseradish peroxidase, alkaline phosphatase, asparaginase, glucose oxidase, beta-galactosidase, ribonuclease, urease, catalase, glucose-6-phosphate dehydrogenase, glucoamylase and acetylcholinesterase. Additionally, the detection can be accomplished by calorimetric methods which employ a chromogenic substrate for the reporter enzyme. Detection may also be accomplished by visual comparison of the extent of enzymatic reaction of a substrate in comparison with similarly prepared standards.

[0415] Detection may also be accomplished using any of a variety of other immunoassays. For example, by radioactively labeling the antibodies or antibody fragments, it is possible to detect polypeptides through the use of a radioimmunoassay (RIA) (see, for example, Weintraub, B., Principles of Radioimmunoassays, Seventh Training Course on Radioligand Assay Techniques, The Endocrine Society, March, 1986, which is incorporated by reference herein). The radioactive isotope can be detected by means including, but not limited to, a gamma counter, a scintillation counter, or autoradiography.

[0416] It is also possible to label the antibody with a fluorescent compound. When the fluorescently labeled antibody is exposed to light of the proper wave length, its presence can then be detected due to fluorescence. Among the most commonly used fluorescent labeling compounds are fluorescein isothiocyanate, rhodamine, phycoerythrin, phycocyanin, allophycocyanin, ophthaldehyde and fluorescamine.

[0417] The antibody can also be detectably labeled using fluorescence emitting metals such as ¹⁵²Eu, or others of the lanthanide series. These metals can be attached to the antibody using such metal chelating groups as diethylenetriaminepentacetic acid (DTPA) or ethylenediaminetetraacetic acid (EDTA).

[0418] The antibody also can be detectably labeled by coupling it to a chemiluminescent compound. The presence of the chemiluminescent-tagged antibody is then determined by detecting the presence of luminescence that arises during the course of a chemical reaction. Examples of particularly useful chemiluminescent labeling compounds are luminol, isoluminol, theromatic acridinium ester, imidazole, acridinium salt and oxalate ester.

[0419] Likewise, a bioluminescent compound may be used to label the antibody of the present invention. Bioluminescence is a type of chemiluminescence found in biological systems in, which a catalytic protein increases the efficiency of the chemiluminescent reaction. The presence of a bioluminescent protein is determined by detecting the presence of luminescence. Important bioluminescent compounds for purposes of labeling are luciferin, luciferase and aequorin.

[0420] Methods for Detecting Diseases

[0421] In general, a disease may be detected in a patient based on the presence of one or more proteins of the invention and/or polynucleotides encoding such proteins in a biological sample (for example, blood, sera, urine, and/or tumor biopsies) obtained from the patient. In other words, such proteins may be used as markers to indicate the presence or absence of a disease or disorder, including cancer and/or as described elsewhere herein. In addition, such proteins may be useful for the detection of other diseases and cancers. The binding agents provided herein generally permit detection of the level of antigen that binds to the agent in the biological sample. Polynucleotide primers and probes may be used to detect the level of mRNA encoding polypeptides of the invention, which is also indicative of the presence or absence of a disease or disorder, including cancer. In general, polypeptides of the invention should be present at a level that is at least three fold higher in diseased tissue than in normal tissue.

[0422] There are a variety of assay formats known to those of ordinary skill in the art for using a binding agent to detect polypeptide markers in a sample. See, e.g., Harlow and Lane, supra. In general, the presence or absence of a disease in a patient may be determined by (a) contacting a biological sample obtained from a patient with a binding agent; (b) detecting in the sample a level of polypeptide that binds to the binding agent; and (c) comparing the level of polypeptide with a predetermined cut-off value.

[0423] In a preferred embodiment, the assay involves the use of a binding agent(s) immobilized on a solid support to bind to and remove the polypeptide of the invention from the remainder of the sample. The bound polypeptide may then be detected using a detection reagent that contains a reporter group and specifically binds to the binding agent/polypeptide complex. Such detection reagents may comprise, for example, a binding agent that specifically binds to the polypeptide or an antibody or other agent that specifically binds to the binding agent, such as an anti-immunoglobulin, protein G, protein A or a lectin. Alternatively, a competitive assay may be utilized, in which a polypeptide is labeled with a reporter group and allowed to bind to the immobilized binding agent after incubation of the binding agent with the sample. The extent to which components of the sample inhibit the binding of the labeled polypeptide to the binding agent is indicative of the reactivity of the sample with the immobilized binding agent. Suitable polypeptides for use within such assays include polypeptides of the invention and portions thereof, or antibodies, to which the binding agent binds, as described above.

[0424] The solid support may be any material known to those of skill in the art to which polypeptides of the invention may be attached. For example, the solid support may be a test well in a microtiter plate or a nitrocellulose or other suitable membrane. Alternatively, the support may be a bead or disc, such as glass fiberglass, latex or a plastic material such as polystyrene or polyvinylchloride. The support may also be a magnetic particle or a fiber optic sensor, such as those disclosed, for example, in U.S. Pat. No. 5,359,681. The binding agent may be immobilized on the solid support using a variety of techniques known to those of skill in the art, which are amply described in the patent and scientific literature. In the context of the present invention, the term “immobilization” refers to both noncovalent association, such as adsorption, and covalent attachment (which may be a direct linkage between the agent and functional groups on the support or may be a linkage by way of a cross-linking agent). Immobilization by adsorption to a well in a microtiter plate or to a membrane is preferred. In such cases, adsorption may be achieved by contacting the binding agent, in a suitable buffer, with the solid support for the suitable amount of time. The contact time varies with temperature, but is typically between about 1 hour and about 1 day. In general, contacting a well of plastic microtiter plate (such as polystyrene or polyvinylchloride) with an amount of binding agent ranging from about 10 ng to about 10 ug, and preferably about 100 ng to about 1 ug, is sufficient to immobilize an adequate amount of binding agent.

[0425] Covalent attachment of binding agent to a solid support may generally be achieved by first reacting the support with a bifunctional reagent that will react with both the support and a functional group, such as a hydroxyl or amino group, on the binding agent. For example, the binding agent may be covalently attached to supports having an appropriate polymer coating using benzoquinone or by condensation of an aldehyde group on the support with an amine and an active hydrogen on the binding partner (see, e.g., Pierce Immunotechnology Catalog and Handbook, 1991, at A12-A13).

[0426] Gene Therapy Methods

[0427] Also encompassed by the invention are gene therapy methods for treating or preventing disorders, diseases and conditions. The gene therapy methods relate to the introduction of nucleic acid (DNA, RNA and antisense DNA or RNA) sequences into an animal to achieve expression of the polypeptide of the present invention. This method requires a polynucleotide which codes for a polypeptide of the present invention operatively linked to a promoter and any other genetic elements necessary for the expression of the polypeptide by the target tissue. Such gene therapy and delivery techniques are known in the art, see, for example, WO90/11092, which is herein incorporated by reference.

[0428] Thus, for example, cells from a patient may be engineered with a polynucleotide (DNA or RNA) comprising a promoter operably linked to a polynucleotide of the present invention ex vivo, with the engineered cells then being provided to a patient to be treated with the polypeptide of the present invention. Such methods are well-known in the art. For example, see Belldegrun, A., et al., J. Natl. Cancer Inst. 85: 207-216 (1993); Ferrantini, M. et al., Cancer Research 53: 1107-1112 (1993); Ferrantini, M. et al., J. Immunology 153: 4604-4615 (1994); Kaido, T., et al., Int. J. Cancer 60: 221-229 (1995); Ogura, H., et al., Cancer Research 50: 5102-5106 (1990); Santodonato, L., et al., Human Gene Therapy 7:1-10 (1996); Santodonato, L., et al., Gene Therapy 4:1246-1255 (1997); and Zhang, J. -F. et al., Cancer Gene Therapy 3: 31-38 (1996)), which are herein incorporated by reference. In one embodiment, the cells which are engineered are arterial cells. The arterial cells may be reintroduced into the patient through direct injection to the artery, the tissues surrounding the artery, or through catheter injection.

[0429] As discussed in more detail below, the polynucleotide constructs can be delivered by any method that delivers injectable materials to the cells of an animal, such as, injection into the interstitial space of tissues (heart, muscle, skin, lung, liver, and the like). The polynucleotide constructs may be delivered in a pharmaceutically acceptable liquid or aqueous carrier.

[0430] In one embodiment, the polynucleotide of the present invention is delivered as a naked polynucleotide. The term “naked” polynucleotide, DNA or RNA refers to sequences that are free from any delivery vehicle that acts to assist, promote or facilitate entry into the cell, including viral sequences, viral particles, liposome formulations, lipofectin or precipitating agents and the like. However, the polynucleotide of the present invention can also be delivered in liposome formulations and lipofectin formulations and the like can be prepared by methods well known to those skilled in the art. Such methods are described, for example, in U.S. Pat. Nos. 5,593,972, 5,589,466, and 5,580,859, which are herein incorporated by reference.

[0431] The polynucleotide vector constructs used in the gene therapy method are preferably constructs that will not integrate into the host genome nor will they contain sequences that allow for replication. Appropriate vectors include pWLNEO, pSV2CAT, pOG44, pXT1 and pSG available from Stratagene; pSVK3, pBPV, pMSG and pSVL available from Pharmacia; and pEF1/V5, pcDNA3.1, and pRc/CMV2 available from Invitrogen. Other suitable vectors will be readily apparent to the skilled artisan.

[0432] Any strong promoter known to those skilled in the art can be used for driving the expression of the polynucleotide sequence. Suitable promoters include adenoviral promoters, such as the adenoviral major late promoter; or heterologous promoters, such as the cytomegalovirus (CMV) promoter; the respiratory syncytial virus (RSV) promoter; inducible promoters, such as the MMT promoter, the metallothionein promoter; heat shock promoters; the albumin promoter; the ApoAI promoter; human globin promoters; viral thymidine kinase promoters, such as the Herpes Simplex thymidine kinase promoter; retroviral LTRs; the b-actin promoter; and human growth hormone promoters. The promoter also may be the native promoter for the polynucleotide of the present invention.

[0433] Unlike other gene therapy techniques, one major advantage of introducing naked nucleic acid sequences into target cells is the transitory nature of the polynucleotide synthesis in the cells. Studies have shown that non-replicating DNA sequences can be introduced into cells to provide production of the desired polypeptide for periods of up to six months.

[0434] The polynucleotide construct can be delivered to the interstitial space of tissues within the an animal, including of muscle, skin, brain, lung, liver, spleen, bone marrow, thymus, heart, lymph, blood, bone, cartilage, pancreas, kidney, gall bladder, stomach, intestine, testis, ovary, uterus, rectum, nervous system, eye, gland, and connective tissue. Interstitial space of the tissues comprises the intercellular, fluid, mucopolysaccharide matrix among the reticular fibers of organ tissues, elastic fibers in the walls of vessels or chambers, collagen fibers of fibrous tissues, or that same matrix within connective tissue ensheathing muscle cells or in the lacunae of bone. It is similarly the space occupied by the plasma of the circulation and the lymph fluid of the lymphatic channels. Delivery to the interstitial space of muscle tissue is preferred for the reasons discussed below. They may be conveniently delivered by injection into the tissues comprising these cells. They are preferably delivered to and expressed in persistent, non-dividing cells which are differentiated, although delivery and expression may be achieved in non-differentiated or less completely differentiated cells, such as, for example, stem cells of blood or skin fibroblasts. In vivo muscle cells are particularly competent in their ability to take up and express polynucleotides.

[0435] For the naked nucleic acid sequence injection, an effective dosage amount of DNA or RNA will be in the range of from about 0.05 mg/kg body weight to about 50 mg/kg body weight. Preferably the dosage will be from about 0.005 mg/kg to about 20 mg/kg and more preferably from about 0.05 mg/kg to about 5 mg/kg. Of course, as the artisan of ordinary skill will appreciate, this dosage will vary according to the tissue site of injection. The appropriate and effective dosage of nucleic acid sequence can readily be determined by those of ordinary skill in the art and may depend on the condition being treated and the route of administration.

[0436] The preferred route of administration is by the parenteral route of injection into the interstitial space of tissues. However, other parenteral routes may also be used, such as, inhalation of an aerosol formulation particularly for delivery to lungs or bronchial tissues, throat or mucous membranes of the nose. In addition, naked DNA constructs can be delivered to arteries during angioplasty by the catheter used in the procedure.

[0437] The naked polynucleotides are delivered by any method known in the art, including, but not limited to, direct needle injection at the delivery site, intravenous injection, topical administration, catheter infusion, and so-called “gene guns”. These delivery methods are known in the art.

[0438] The constructs may also be delivered with delivery vehicles such as viral sequences, viral particles, liposome formulations, lipofectin, precipitating agents, etc. Such methods of delivery are known in the art.

[0439] In certain embodiments, the polynucleotide constructs are complexed in a liposome preparation. Liposomal preparations for use in the instant invention include cationic (positively charged), anionic (negatively charged) and neutral preparations. However, cationic liposomes are particularly preferred because a tight charge complex can be formed between the cationic liposome and the polyanionic nucleic acid. Cationic liposomes have been shown to mediate intracellular delivery of plasmid DNA (Felgner et al., Proc. Natl. Acad. Sci. USA (1987) 84:7413-7416, which is herein incorporated by reference); mRNA (Malone et al., Proc. Natl. Acad. Sci. USA (1989) 86:6077-6081, which is herein incorporated by reference); and purified transcription factors (Debs et al., J. Biol. Chem. (1990) 265:10189-10192, which is herein incorporated by reference), in functional form.

[0440] Cationic liposomes are readily available. For example, N[1-2,3-dioleyloxy)propyl]-N,N,N-triethylammonium (DOTMA) liposomes are particularly useful and are available under the trademark Lipofectin, from GIBCO BRL, Grand Island, N.Y. (See, also, Felgner et al., Proc. Natl Acad. Sci. USA (1987) 84:7413-7416, which is herein incorporated by reference). Other commercially available liposomes include transfectace (DDAB/DOPE) and DOTAP/DOPE (Boehringer).

[0441] Other cationic liposomes can be prepared from readily available materials using techniques well known in the art. See, e.g. PCT Publication No. WO 90/11092 (which is herein incorporated by reference) for a description of the synthesis of DOTAP (1,2-bis(oleoyloxy)-3-(trimethylammonio)propane) liposomes. Preparation of DOTMA liposomes is explained in the literature, see, e.g., P. Felgner et al., Proc. Natl. Acad. Sci. USA 84:7413-7417, which is herein incorporated by reference. Similar methods can be used to prepare liposomes from other cationic lipid materials.

[0442] Similarly, anionic and neutral liposomes are readily available, such as from Avanti Polar Lipids (Birmingham, Ala.), or can be easily prepared using readily available materials. Such materials include phosphatidyl, choline, cholesterol, phosphatidyl ethanolamine, dioleoylphosphatidyl choline (DOPC), dioleoylphosphatidyl glycerol (DOPG), dioleoylphoshatidyl ethanolamine (DOPE), among others. These materials can also be mixed with the DOTMA and DOTAP starting materials in appropriate ratios. Methods for making liposomes using these materials are well known in the art.

[0443] For example, commercially dioleoylphosphatidyl choline (DOPC), dioleoylphosphatidyl glycerol (DOPG), and dioleoylphosphatidyl ethanolamine (DOPE) can be used in various combinations to make conventional liposomes, with or without the addition of cholesterol. Thus, for example, DOPG/DOPC vesicles can be prepared by drying 50 mg each of DOPG and DOPC under a stream of nitrogen gas into a sonication vial. The sample is placed under a vacuum pump overnight and is hydrated the following day with deionized water. The sample is then sonicated for 2 hours in a capped vial, using a Heat Systems model 350 sonicator equipped with an inverted cup (bath type) probe at the maximum setting while the bath is circulated at 15EC. Alternatively, negatively charged vesicles can be prepared without sonication to produce multilamellar vesicles or by extrusion through nucleopore membranes to produce unilamellar vesicles of discrete size. Other methods are known and available to those of skill in the art.

[0444] The liposomes can comprise multilamellar vesicles (MLVs), small unilamellar vesicles (SUVs), or large unilamellar vesicles (LUVs), with SUVs being preferred. The various liposome-nucleic acid complexes are prepared using methods well known in the art. See, e.g., Straubinger et al., Methods of Immunology (1983), 101:512-527, which is herein incorporated by reference. For example, MLVs containing nucleic acid can be prepared by depositing a thin film of phospholipid on the walls of a glass tube and subsequently hydrating with a solution of the material to be encapsulated. SUVs are prepared by extended sonication of MLVs to produce a homogeneous population of unilamellar liposomes. The material to be entrapped is added to a suspension of preformed MLVs and then sonicated. When using liposomes containing cationic lipids, the dried lipid film is resuspended in an appropriate solution such as sterile water or an isotonic buffer solution such as 10 mM Tris/NaCl, sonicated, and then the preformed liposomes are mixed directly with the DNA. The liposome and DNA form a very stable complex due to binding of the positively charged liposomes to the cationic DNA. SUVs find use with small nucleic acid fragments. LUVs are prepared by a number of methods, well known in the art. Commonly used methods include Ca²⁺-EDTA chelation (Papahadjopoulos et al., Biochim. Biophys. Acta (1975) 394:483; Wilson et al., Cell 17:77 (1979)); ether injection (Deamer, D. and Bangham, A., Biochim. Biophys. Acta 443:629 (1976); Ostro et al., Biochem. Biophys. Res. Commun. 76:836 (1977); Fraley et al., Proc. Natl. Acad. Sci. USA 76:3348 (1979)); detergent dialysis (Enoch, H. and Strittmatter, P., Proc. Natl. Acad. Sci. USA 76:145 (1979)); and reverse-phase evaporation (REV) (Fraley et al., J. Biol. Chem. 255:10431 (1980); Szoka, F. and Papahadjopoulos, D., Proc. Natl. Acad. Sci. USA 75:145 (1978); Schaefer-Ridder et al., Science 215:166 (1982)), which are herein incorporated by reference.

[0445] Generally, the ratio of DNA to liposomes will be from about 10:1 to about 1:10. Preferably, the ration will be from about 5:1 to about 1:5. More preferably, the ration will be about 3:1 to about 1:3. Still more preferably, the ratio will be about 1:1.

[0446] U.S. Pat. No. 5,676,954 (which is herein incorporated by reference) reports on the injection of genetic material, complexed with cationic liposomes carriers, into mice. U.S. Pat. Nos. 4,897,355, 4,946,787, 5,049,386, 5,459,127, 5,589,466, 5,693,622, 5,580,859, 5,703,055, and international publication no. WO 94/9469 (which are herein incorporated by reference) provide cationic lipids for use in transfecting DNA into cells and mammals. U.S. Pat. Nos. 5,589,466, 5,693,622, 5,580,859, 5,703,055, and international publication no. WO 94/9469 provide methods for delivering DNA-cationic lipid complexes to mammals.

[0447] In certain embodiments, cells are engineered, ex vivo or in vivo, using a retroviral particle containing RNA which comprises a sequence encoding a polypeptide of the present invention. Retroviruses from which the retroviral plasmid vectors may be derived include, but are not limited to, Moloney Murine Leukemia Virus, spleen necrosis virus, Rous sarcoma Virus, Harvey Sarcoma Virus, avian leukosis virus, gibbon ape leukemia virus, human immunodeficiency virus, Myeloproliferative Sarcoma Virus, and mammary tumor virus.

[0448] The retroviral plasmid vector is employed to transduce packaging cell lines to form producer cell lines. Examples of packaging cells which may be transfected include, but are not limited to, the PE501, PA317, R-2, R-AM, PA12, T19-14X, VT-19-17-H2, RCRE, RCRIP, GP+E-86, GP+envAml2, and DAN cell lines as described in Miller, Human Gene Therapy 1:5-14 (1990), which is incorporated herein by reference in its entirety. The vector may transduce the packaging cells through any means known in the art. Such means include, but are not limited to, electroporation, the use of liposomes, and CaPO₄ precipitation. In one alternative, the retroviral plasmid vector may be encapsulated into a liposome, or coupled to a lipid, and then administered to a host.

[0449] The producer cell line generates infectious retroviral vector particles which include polynucleotide encoding a polypeptide of the present invention. Such retroviral vector particles then may be employed, to transduce eukaryotic cells, either in vitro or in vivo. The transduced eukaryotic cells will express a polypeptide of the present invention.

[0450] In certain other embodiments, cells are engineered, ex vivo or in vivo, with polynucleotide contained in an adenovirus vector. Adenovirus can be manipulated such that it encodes and expresses a polypeptide of the present invention, and at the same time is inactivated in terms of its ability to replicate in a normal lytic viral life cycle. Adenovirus expression is achieved without integration of the viral DNA into the host cell chromosome, thereby alleviating concerns about insertional mutagenesis. Furthermore, adenoviruses have been used as live enteric vaccines for many years with an excellent safety profile (Schwartz et al. Am. Rev. Respir. Dis.109:233-238 (1974)). Finally, adenovirus mediated gene transfer has been demonstrated in a number of instances including transfer of alpha-1-antitrypsin and CFTR to the lungs of cotton rats (Rosenfeld, M. A. et al. (1991) Science 252:431-434; Rosenfeld et al., (1992) Cell 68:143-155). Furthermore, extensive studies to attempt to establish adenovirus as a causative agent in human cancer were uniformly negative (Green, M. et al. (1979) Proc. Natl. Acad. Sci. USA 76:6606).

[0451] Suitable adenoviral vectors useful in the present invention are described, for example, in Kozarsky and Wilson, Curr. Opin. Genet. Devel. 3:499-503 (1993); Rosenfeld et al., Cell 68:143-155 (1992); Engelhardt et al., Human Genet. Ther. 4:759-769 (1993); Yang et al., Nature Genet. 7:362-369 (1994); Wilson et al., Nature 365:691-692 (1993); and U.S. Pat. No. 5,652,224, which are herein incorporated by reference. For example, the adenovirus vector Ad2 is useful and can be grown in human 293 cells. These cells contain the El region of adenovirus and constitutively express Ela and Elb, which complement the defective adenoviruses by providing the products of the genes deleted from the vector. In addition to Ad2, other varieties of adenovirus (e.g., Ad3, Ad5, and Ad7) are also useful in the present invention.

[0452] Preferably, the adenoviruses used in the present invention are replication deficient. Replication deficient adenoviruses require the aid of a helper virus and/or packaging cell line to form infectious particles. The resulting virus is capable of infecting cells and can express a polynucleotide of interest which is operably linked to a promoter, but cannot replicate in most cells. Replication deficient adenoviruses may be deleted in one or more of all or a portion of the following genes: E1a, E1b, E3, E4, E2a, or L1 through L5.

[0453] In certain other embodiments, the cells are engineered, ex vivo or in vivo, using an adeno-associated virus (AAV). AAVs are naturally occurring defective viruses that require helper viruses to produce infectious particles (Muzyczka, N., Curr. Topics in Microbiol. Immunol. 158:97 (1992)). It is also one of the few viruses that may integrate its DNA into non-dividing cells. Vectors containing as little as 300 base pairs of AAV can be packaged and can integrate, but space for exogenous DNA is limited to about 4.5 kb. Methods for producing and using such AAVs are known in the art. See, for example, U.S. Pat. Nos. 5,139,941, 5,173,414, 5,354,678, 5,436,146, 5,474,935, 5,478,745, and 5,589,377.

[0454] For example, an appropriate AAV vector for use in the present invention will include all the sequences necessary for DNA replication, encapsidation, and host-cell integration. The polynucleotide construct is inserted into the AAV vector using standard cloning methods, such as those found in Sambrook et al., Molecular Cloning: A Laboratory Manual, Cold Spring Harbor Press (1989). The recombinant AAV vector is then transfected into packaging cells which are infected with a-helper virus, using any standard technique, including lipofection, electroporation, calcium phosphate precipitation, etc. Appropriate helper viruses include adenoviruses, cytomegaloviruses, vaccinia viruses, or herpes viruses. Once the packaging cells are transfected and infected, they will produce infectious AAV viral particles which contain the polynucleotide construct. These viral particles are then used to transduce eukaryotic cells, either ex vivo or in vivo. The transduced cells will contain the polynucleotide construct integrated into its genome, and will express a polypeptide of the invention.

[0455] Another method of gene therapy involves operably associating heterologous control regions and endogenous polynucleotide sequences (e.g. encoding a polypeptide of the present invention) via homologous recombination (see, e.g., U.S. Pat. No. 5,641,670, issued Jun. 24, 1997; International Publication No. WO 96/29411, published September 26, 1996; International Publication No. WO 94/12650, published Aug. 4, 1994; Koller et al., Proc. Natl. Acad. Sci. USA 86:8932-8935 (1989); and Zijlstra et al., Nature 342:435-438 (1989), which are herein encorporated by reference. This method involves the activation of a gene which is present in the target cells, but which is not normally expressed in the cells, or is expressed at a lower level than desired.

[0456] Polynucleotide constructs are made, using standard techniques known in the art, which contain the promoter with targeting sequences flanking the promoter. Suitable promoters are described herein. The targeting sequence is sufficiently complementary to an endogenous sequence to permit homologous recombination of the promoter-targeting sequence with the endogenous sequence. The targeting sequence will be sufficiently near the 5′ end of the desired endogenous polynucleotide sequence so the promoter will be operably linked to the endogenous sequence upon homologous recombination.

[0457] The promoter and the targeting sequences can be amplified using PCR. Preferably, the amplified promoter contains distinct restriction enzyme sites on the 5′ and 3′ ends. Preferably, the 3′ end of the first targeting sequence contains the same restriction enzyme site as the 5′ end of the amplified promoter and the 5′ end of the second targeting sequence contains the same restriction site as the 3′ end of the amplified promoter. The amplified promoter and targeting sequences are digested and ligated together.

[0458] The promoter-targeting sequence construct is delivered to the cells, either as naked polynucleotide, or in conjunction with transfection-facilitating agents, such as liposomes, viral sequences, viral particles, whole viruses, lipofection, precipitating agents, etc., described in more detail above. The P promoter-targeting sequence can be delivered by any method, included direct needle injection, intravenous injection, topical administration, catheter infusion, particle accelerators, etc. The methods are described in more detail below.

[0459] The promoter-targeting sequence construct is taken up by cells. Homologous recombination between the construct and the endogenous sequence takes place, such that an endogenous sequence is placed under the control of the promoter. The promoter then drives the expression of the endogenous sequence.

[0460] The polynucleotide encoding a polypeptide of the present invention may contain a secretory signal sequence that facilitates secretion of the protein. Typically, the signal sequence is positioned in the coding region of the polynucleotide to be expressed towards or at the 5′ end of the coding region. The signal sequence may be homologous or heterologous to the polynucleotide of interest and may be homologous or heterologous to the cells to be transfected. Additionally, the signal sequence may be chemically synthesized using methods known in the art.

[0461] Any mode of administration of any of the above-described polynucleotides constructs can be used so long as the mode results in the expression of one or more molecules in an amount sufficient to provide a therapeutic effect. This includes direct needle injection, systemic injection, catheter infusion, biolistic injectors, particle accelerators (i.e., “gene guns”), gelfoam sponge depots, other commercially available depot materials, osmotic pumps (e.g., Alza minipumps), oral or suppositorial solid (tablet or pill) pharmaceutical formulations, and decanting or topical applications during surgery. For example, direct injection of naked calcium phosphate-precipitated plasmid into rat liver and rat spleen or a protein-coated plasmid into the portal vein has resulted in gene expression of the foreign gene in the rat livers (Kaneda et al., Science 243:375 (1989)).

[0462] A preferred method of local administration is by direct injection. Preferably, a recombinant molecule of the present invention complexed with a delivery vehicle is administered by direct injection into or locally within the area of arteries. Administration of a composition locally within the area of arteries refers to injecting the composition centimeters and preferably, millimeters within arteries.

[0463] Another method of local administration is to contact a polynucleotide construct of the present invention in or around a surgical wound. For example, a patient can undergo surgery and the polynucleotide construct can be coated on the surface of tissue inside the wound or the construct can be injected into areas of tissue inside the wound.

[0464] Therapeutic compositions useful in systemic administration, include recombinant molecules of the present invention complexed to a targeted delivery vehicle of the present invention. Suitable delivery vehicles for use with systemic administration comprise liposomes comprising ligands for targeting the vehicle to a particular site. In specific embodiments, suitable delivery vehicles for use with systemic administration comprise liposomes comprising polypeptides of the invention for targeting the vehicle to a particular site.

[0465] Preferred methods of systemic administration, include intravenous injection, aerosol, oral and percutaneous (topical) delivery. Intravenous injections can be performed using methods standard in the art. Aerosol delivery can also be performed using methods standard in the art (see, for example, Stribling et al., Proc. Natl. Acad. Sci. USA 189:11277-11281, 1992, which is incorporated herein by reference). Oral delivery can be performed by complexing a polynucleotide construct of the present invention to a carrier capable of withstanding degradation by digestive enzymes in the gut of an animal. Examples of such carriers, include plastic capsules or tablets, such as those known in the art. Topical delivery can be performed by mixing a polynucleotide construct of the present invention with a lipophilic reagent (e.g., DMSO) that is capable of passing into the skin.

[0466] Determining an effective amount of substance to be delivered can depend upon a number of factors including, for example, the chemical structure and biological activity of the substance, the age and weight of the animal, the precise condition requiring treatment and its severity, and the route of administration. The frequency of treatments depends upon a number of factors, such as the amount of polynucleotide constructs administered per dose, as well as the health and history of the subject. The precise amount, number of doses, and timing of doses will be determined by the attending physician or veterinarian.

[0467] Therapeutic compositions of the present invention can be administered to any animal, preferably to mammals and birds. Preferred mammals include humans, dogs, cats, mice, rats, rabbits sheep, cattle, horses and pigs, with humans being particularly preferred.

[0468] Biological Activities

[0469] Polynucleotides or polypeptides, or agonists or antagonists of the present invention, can be used in assays to test for one or more biological activities. If these polynucleotides or polypeptides, or agonists or antagonists of the present invention, do exhibit activity in a particular assay, it is likely that these molecules may be involved in the diseases associated with the biological activity. Thus, the polynucleotides and polypeptides, and agonists or antagonists, could be used to treat the associated disease.

[0470] Members of the inflammation-associated family of proteins are believed to be involved in biological activities associated with the inflammatory reponse. Accordingly, compositions of the invention (including polynucleotides, polypeptides and antibodies of the invention, and fragments and variants thereof) may be used in the diagnosis, prognosis, prevention, and/or treatment of diseases and/or disorders associated with inappropriate or excessive inflammation.

[0471] In preferred embodiments, compositions of the invention (including polynucleotides, polypeptides and antibodies of the invention, and fragments and variants thereof) may be used in the diagnosis, prognosis, prevention, and/or treatment of diseases and/or disorders relating to infection (e.g. pneumonia, Legionnaires' disease, tuberculosis, meningitis, encephalitis, viral hepatitis, septic shock, and/or as described below under the sections entitled “Immune Activity” and “Infectious Disease”), hypersensitivities (e.g. allergic rhinitis, skin allergies, anaphylaxis, asthma, and/or as described below under “Immune Activity”), autoimmune diseases (e.g. multiple sclerosis, rheumatoid arthritis, systemic lupus erythematosus, myasthenia gravis, transplant rejection, and/or as described under the section entitled “Immune Activity”), inflammatory cardiovascular disorders (e.g. vasculitis, myocarditis, cardiopulmonary bypass complications, and/or as described below under “Cardiovascular Disorders” and “Immune Activity”), and neoplastic disorders (e.g. gastrointestinal, lung, and ovarian cancers, and/or as described under “Hyperproliferative Disorders” below.)

[0472] In another emobodiment, compositions of the invention (including polynucleotides, polypeptides and antibodies of the invention, as well as fragments, variants, agonists, and antagonists thereof) may be used to diagnose, prognose, prevent, and/or treat male infertility and/or impotence.

[0473] In another emobodiment, compositions of the invention (including polynucleotides, polypeptides and antibodies of the invention, as well as fragments, variants, agonists, and antagonists thereof) may be used to enhance blood flow, for example in the treatment and/or prevention of ischemia, and/or disorders described herein under “Cardiovascular Disorders”.

[0474] In another emobodiment, compositions of the invention (including polynucleotides, polypeptides and antibodies of the invention, as well as fragments, variants, agonists, and antagonists thereof) may be used to enhance delivery of chemotherapeutic drugs across the blood-brain barrier, for example in the treatment of cancers and neurological disorders (as further described herein under “Immune Activity”, “Hyperproliferative Disorders”, and “Neural Activity and Neurological Diseases”).

[0475] In further preferred embodiments, compositions of the invention (including polynucleotides, polypeptides and antibodies of the invention, and fragments and variants thereof) may be used to attenuate or prevent the inflammatory response following physical trauma (e.g. traumatic head injury), bums, cardiopulmonary bypass surgery, and/or renal ischemia-reperfusion.

[0476] In another embodiment, a polypeptide of the invention, or polynucleotides, antibodies, agonists, or antagonists corresponding to that polypeptide, may be used to diagnose, prognose, prevent, and/or treat inflammatory disorders associated with the tissue(s) in which the polypeptide of the invention is expressed, including one, two, three, four, five, or more tissues disclosed in Table 1A, column 8 (Tissue Distribution Library Code). Such tissue-specific inflammatory disorders include encephalitis, myocarditis, nephritis, and/or those disclosed below under “Immune Activity”.

[0477] Thus, polynucleotides, translation products and antibodies of the invention are useful in the diagnosis, prognosis, prevention and/or treatment of diseases, conditions, and/or disorders which include, but are not limited to, infection, hypersensitivities, autoimmunity, cardiovascular disease, cancer, and trauma.

[0478] Because inflammation is a fundamental bodily defense mechanism, inflammation-associated polynucleotides, polypeptides and antibodies of the invention are likely to have uses in a wide range of inflammatory disorders. Therefore, the above-mentioned biological activities are not intended to be limiting.

[0479] More generally, polynucleotides, translation products and antibodies corresponding to this gene may be useful for the diagnosis, prognosis, prevention and/or treatment of diseases and/or disorders associated with the following systems.

[0480] Immune Activity

[0481] Polynucleotides, polypeptides, antibodies, and/or agonists or antagonists of the present invention may be useful in treating, preventing, diagnosing and/or prognosing diseases, disorders, and/or conditions of the immune system, by, for example, activating or inhibiting the proliferation, differentiation, or mobilization (chemotaxis) of immune cells. Immune cells develop through a process called hematopoiesis, producing myeloid (platelets, red blood cells, neutrophils, and macrophages) and lymphoid (B and T lymphocytes) cells from pluripotent stem cells. The etiology of these immune diseases, disorders, and/or conditions may be genetic, somatic, such as cancer and some autoimmune diseases, acquired (e.g., by chemotherapy or toxins), or infectious. Moreover, polynucleotides, polypeptides, antibodies, and/or agonists or antagonists of the present invention can be used as a marker or detector of a particular immune system disease or disorder.

[0482] In another embodiment, a polypeptide of the invention, or polynucleotides, antibodies, agonists, or antagonists corresponding to that polypeptide, may be used to treat diseases and disorders of the immune system and/or to inhibit or enhance an immune response generated by cells associated with the tissue(s) in which the polypeptide of the invention is expressed, including one, two, three, four, five, or more tissues disclosed in Table 1A, column 8 (Tissue Distribution Library Code).

[0483] Polynucleotides, polypeptides, antibodies, and/or agonists or antagonists of the present invention may be useful in treating, preventing, diagnosing, and/or prognosing immunodeficiencies, including both congenital and acquired immunodeficiencies. Examples of B cell immunodeficiencies in which immunoglobulin levels B cell function and/or B cell numbers are decreased include: X-linked agammaglobulinemia (Bruton's disease), X-linked infantile agammaglobulinemia, X-linked immunodeficiency with hyper IgM, non X-linked immunodeficiency with hyper IgM, X-linked lymphoproliferative syndrome (XLP), agammaglobulinemia including congenital and acquired agammaglobulinemia, adult onset agammaglobulinemia, late-onset agammaglobulinemia, dysgammaglobulinemia, hypogammaglobulinemia, unspecified hypogammaglobulinemia, recessive agammaglobulinemia (Swiss type), Selective IgM deficiency, selective IgA deficiency, selective IgG subclass deficiencies, IgG subclass deficiency (with or without IgA deficiency), Ig deficiency with increased IgM, IgG and IgA deficiency with increased IgM, antibody deficiency with normal or elevated Igs, Ig heavy chain deletions, kappa chain deficiency, B cell lymphoproliferative disorder (BLPD), common variable immunodeficiency (CVID), common variable immunodeficiency (CVI) (acquired), and transient hypogammaglobulinemia of infancy.

[0484] In specific embodiments, ataxia-telangiectasia or conditions associated with ataxia-telangiectasia are treated, prevented, diagnosed, and/or prognosing using the polypeptides or polynucleotides of the invention, and/or agonists or antagonists thereof.

[0485] Examples of congenital immunodeficiencies in which T cell and/or B cell function and/or number is decreased include, but are not limited to: DiGeorge anomaly, severe combined immunodeficiencies (SCID) (including, but not limited to, X-linked SCID, autosomal recessive SCID, adenosine deaminase deficiency, purine nucleoside phosphorylase (PNP) deficiency, Class II MHC deficiency (Bare lymphocyte syndrome), Wiskott-Aldrich syndrome, and ataxia telangiectasia), thymic hypoplasia, third and fourth pharyngeal pouch syndrome, 22q11.2 deletion, chronic mucocutaneous candidiasis, natural killer cell deficiency (NK), idiopathic CD4+ T-lymphocytopenia, immunodeficiency with predominant T cell defect (unspecified), and unspecified immunodeficiency of cell mediated immunity.

[0486] In specific embodiments, DiGeorge anomaly or conditions associated with DiGeorge anomaly are treated, prevented, diagnosed, and/or prognosed using polypeptides or polynucleotides of the invention, or antagonists or agonists thereof.

[0487] Other immunodeficiencies that may be treated, prevented, diagnosed, and/or prognosed using polypeptides or polynucleotides of the invention, and/or agonists or antagonists thereof, include, but are not limited to, chronic granulomatous disease, Chédiak-Higashi syndrome, myeloperoxidase deficiency, leukocyte glucose-6-phosphate dehydrogenase deficiency, X-linked lymphoproliferative syndrome (XLP), leukocyte adhesion deficiency, complement component deficiencies (including C1, C2, C3, C4, C5, C6, C7, C8 and/or C9 deficiencies), reticular dysgenesis, thymic alymphoplasia-aplasia, immunodeficiency with thymoma, severe congenital leukopenia, dysplasia with immunodeficiency, neonatal neutropenia, short limbed dwarfism, and Nezelof syndrome-combined immunodeficiency with Igs.

[0488] In a preferred embodiment, the immunodeficiencies and/or conditions associated with the immunodeficiencies recited above are treated, prevented, diagnosed and/or prognosed using polynucleotides, polypeptides, antibodies, and/or agonists or antagonists of the present invention.

[0489] In a preferred embodiment polynucleotides, polypeptides, antibodies, and/or agonists or antagonists of the present invention could be used as an agent to boost immunoresponsiveness among immunodeficient individuals. In specific embodiments, polynucleotides, polypeptides, antibodies, and/or agonists or antagonists of the present invention could be used as an agent to boost immunoresponsiveness among B cell and/or T cell immunodeficient individuals.

[0490] The polynucleotides, polypeptides, antibodies, and/or agonists or antagonists of the present invention may be useful in treating, preventing, diagnosing and/or prognosing autoimmune disorders. Many autoimmune disorders result from inappropriate recognition of self as foreign material by immune cells. This inappropriate recognition results in an immune response leading to the destruction of the host tissue. Therefore, the administration of polynucleotides and polypeptides of the invention that can inhibit an immune response, particularly the proliferation, differentiation, or chemotaxis of T-cells, may be an effective therapy in preventing autoimmune disorders.

[0491] Autoimmune diseases or disorders that may be treated, prevented, diagnosed and/or prognosed by polynucleotides, polypeptides, antibodies, and/or agonists or antagonists of the present invention include, but are not limited to, one or more of the following: systemic lupus erythematosus, rheumatoid arthritis, ankylosing spondylitis, multiple sclerosis, autoimmune thyroiditis, Hashimoto's thyroiditis, autoimmune hemolytic anemia, hemolytic anemia, thrombocytopenia, autoimmune thrombocytopenia purpura, autoimmune neonatal thrombocytopenia, idiopathic thrombocytopenia purpura, purpura (e.g., Henloch-Scoenlein purpura), autoimmunocytopenia, Goodpasture's syndrome, Pemphigus vulgaris, myasthenia gravis, Grave's disease (hyperthyroidism), and insulin-resistant diabetes mellitus.

[0492] Additional disorders that are likely to have an autoimmune component that may be treated, prevented, and/or diagnosed with the compositions of the invention include, but are not limited to, type II collagen-induced arthritis, antiphospholipid syndrome, dermatitis, allergic encephalomyelitis, myocarditis, relapsing polychondritis, rheumatic heart disease, neuritis, uveitis ophthalmia, polyendocrinopathies, Reiter's Disease, Stiff-Man Syndrome, autoimmune pulmonary inflammation, autism, Guillain-Barre Syndrome, insulin dependent diabetes mellitus, and autoimmune inflammatory eye disorders.

[0493] Additional disorders that are likely to have an autoimmune component that may be treated, prevented, diagnosed and/or prognosed with the compositions of the invention include, but are not limited to, scleroderma with anti-collagen antibodies (often characterized, e.g., by nucleolar and other nuclear antibodies), mixed connective tissue disease (often characterized, e.g., by antibodies to extractable nuclear antigens (e.g., ribonucleoprotein)), polymyositis (often characterized, e.g., by nonhistone ANA), pernicious anemia (often characterized, e.g., by antiparietal cell, microsomes, and intrinsic factor antibodies), idiopathic Addison's disease (often characterized, e.g., by humoral and cell-mediated adrenal cytotoxicity, infertility (often characterized, e.g., by antispermatozoal antibodies), glomerulonephritis (often characterized, e.g., by glomerular basement membrane antibodies or immune complexes), bullous pemphigoid (often characterized, e.g., by IgG and complement in basement membrane), Sjogren's syndrome (often characterized, e.g., by multiple tissue antibodies, and/or a specific nonhistone ANA (SS-B)), diabetes mellitus (often characterized, e.g., by cell-mediated and humoral islet cell antibodies), and adrenergic drug resistance (including adrenergic drug resistance with asthma or cystic fibrosis) (often characterized, e.g., by beta-adrenergic receptor antibodies).

[0494] Additional disorders that may have an autoimmune component that may be treated, prevented, diagnosed and/or prognosed with the compositions of the invention include, but are not limited to, chronic active hepatitis (often characterized, e.g., by smooth muscle antibodies), primary biliary cirrhosis (often characterized, e.g., by mitochondria antibodies), other endocrine gland failure (often characterized, e.g., by specific tissue antibodies in some cases), vitiligo (often characterized, e.g., by melanocyte antibodies), vasculitis (often characterized, e.g., by Ig and complement in vessel walls and/or low serum complement), post-MI (often characterized, e.g., by myocardial antibodies), cardiotomy syndrome (often characterized, e.g., by myocardial antibodies), urticaria (often characterized, e.g., by IgG and IgM antibodies to IgE), atopic dermatitis (often characterized, e.g., by IgG and IgM antibodies to IgE), asthma (often characterized, e.g., by IgG and IgM antibodies to IgE), and many other inflammatory, granulomatous, degenerative, and atrophic disorders.

[0495] In a preferred embodiment, the autoimmune diseases and disorders and/or conditions associated with the diseases and disorders recited above are treated, prevented, diagnosed and/or prognosed using for example, antagonists or agonists, polypeptides or polynucleotides, or antibodies of the present invention. In a specific preferred embodiment, rheumatoid arthritis is treated, prevented, and/or diagnosed using polynucleotides, polypeptides, antibodies, and/or agonists or antagonists of the present invention.

[0496] In another specific preferred embodiment, systemic lupus erythematosus is treated, prevented, and/or diagnosed using polynucleotides, polypeptides, antibodies, and/or agonists or antagonists of the present invention. In another specific preferred embodiment, idiopathic thrombocytopenia purpura is treated, prevented, and/or diagnosed using polynucleotides, polypeptides, antibodies, and/or agonists or antagonists of the present invention.

[0497] In another specific preferred embodiment IgA nephropathy is treated, prevented, and/or diagnosed using polynucleotides, polypeptides, antibodies, and/or agonists or antagonists of the present invention.

[0498] In a preferred embodiment, the autoimmune diseases and disorders and/or conditions associated with the diseases and disorders recited above are treated, prevented, diagnosed and/or prognosed using polynucleotides, polypeptides, antibodies, and/or agonists or antagonists of the present invention

[0499] In preferred embodiments, polypeptides, antibodies, polynucleotides and/or agonists or antagonists of the present invention are used as a immunosuppressive agent(s).

[0500] Polynucleotides, polypeptides, antibodies, and/or agonists or antagonists of the present invention may be useful in treating, preventing, prognosing, and/or diagnosing diseases, disorders, and/or conditions of hematopoietic cells. Polynucleotides, polypeptides, antibodies, and/or agonists or antagonists of the present invention could be used to increase differentiation and proliferation of hematopoietic cells, including the pluripotent stem cells, in an effort to treat or prevent those diseases, disorders, and/or conditions associated with a decrease in certain (or many) types hematopoietic cells, including but not limited to, leukopenia, neutropenia, anemia, and thrombocytopenia. Alternatively, Polynucleotides, polypeptides, antibodies, and/or agonists or antagonists of the present invention could be used to increase differentiation and proliferation of hematopoietic cells, including the pluripotent stem cells, in an effort to treat or prevent those diseases, disorders, and/or conditions associated with an increase in certain (or many) types of hematopoietic cells, including but not limited to, histiocytosis.

[0501] Allergic reactions and conditions, such as asthma (particularly allergic asthma) or other respiratory problems, may also be treated, prevented, diagnosed and/or prognosed using polypeptides, antibodies, or polynucleotides of the invention, and/or agonists or antagonists thereof. Moreover, these molecules can be used to treat, prevent, prognose, and/or diagnose anaphylaxis, hypersensitivity to an antigenic molecule, or blood group incompatibility.

[0502] Additionally, polypeptides or polynucleotides of the invention, and/or agonists or antagonists thereof, may be used to treat, prevent, diagnose and/or prognose IgE-mediated allergic reactions. Such allergic reactions include, but are not limited to, asthma, rhinitis, and eczema. In specific embodiments, polynucleotides, polypeptides, antibodies, and/or agonists or antagonists of the present invention may be used to modulate IgE concentrations in vitro or in vivo.

[0503] Moreover, polynucleotides, polypeptides, antibodies, and/or agonists or antagonists of the present invention have uses in the diagnosis, prognosis, prevention, and/or treatment of inflammatory conditions. For example, since polypeptides, antibodies, or polynucleotides of the invention, and/or agonists or antagonists of the invention may inhibit the activation, proliferation and/or differentiation of cells involved in an inflammatory response, these molecules can be used to prevent and/or treat chronic and acute inflammatory conditions. Such inflammatory conditions include, but are not limited to, for example, inflammation associated with infection (e.g., septic shock, sepsis, or systemic inflammatory response syndrome), ischemia-reperfusion injury, endotoxin lethality, complement-mediated hyperacute rejection, nephritis, cytokine or chemokine induced lung injury, inflammatory bowel disease, Crohn's disease, over production of cytokines (e.g., TNF or IL-1.), respiratory disorders (e.g., asthma and allergy); gastrointestinal disorders (e.g., inflammatory bowel disease); cancers (e.g., gastric, ovarian, lung, bladder, liver, and breast); CNS disorders (e.g., multiple sclerosis; ischemic brain injury and/or stroke, traumatic brain injury, neurodegenerative disorders (e.g., Parkinson's disease and Alzheimer's disease); AIDS-related dementia; and prion disease); cardiovascular disorders (e.g., atherosclerosis, myocarditis, cardiovascular disease, and cardiopulmonary bypass complications); as well as many additional diseases, conditions, and disorders that are characterized by inflammation (e.g., hepatitis, rheumatoid arthritis, gout, trauma, pancreatitis, sarcoidosis, dermatitis, renal ischemia-reperfusion injury, Grave's disease, systemic lupus erythematosus, diabetes mellitus, and allogenic transplant rejection).

[0504] Because inflammation is a fundamental defense mechanism, inflammatory disorders can effect virtually any tissue of the body. Accordingly, polynucleotides, polypeptides, and antibodies of the invention, as well as agonists or antagonists thereof, have uses in the treatment of tissue-specific inflammatory disorders, including, but not limited to, adrenalitis, alveolitis, angiocholecystitis, appendicitis, balanitis, blepharitis, bronchitis, bursitis, carditis, cellulitis, cervicitis, cholecystitis, chorditis, cochlitis, colitis, conjunctivitis, cystitis, dermatitis, diverticulitis, encephalitis, endocarditis, esophagitis, eustachitis, fibrositis, folliculitis, gastritis, gastroenteritis, gingivitis, glossitis, hepatosplenitis, keratitis, labyrinthitis, laryngitis, lymphangitis, mastitis, media otitis, meningitis, metritis, mucitis, myocarditis, myosititis, myringitis, nephritis, neuritis, orchitis, osteochondritis, otitis, pericarditis, peritendonitis, peritonitis, pharyngitis, phlebitis, poliomyelitis, prostatitis, pulpitis, retinitis, rhinitis, salpingitis, scleritis, sclerochoroiditis, scrotitis, sinusitis, spondylitis, steatitis, stomatitis, synovitis, syringitis, tendonitis, tonsillitis, urethritis, and vaginitis.

[0505] In specific embodiments, polypeptides, antibodies, or polynucleotides of the invention, and/or agonists or antagonists thereof, are useful to diagnose, prognose, prevent, and/or treat organ transplant rejections and graft-versus-host disease. Organ rejection occurs by host immune cell destruction of the transplanted tissue through an immune response. Similarly, an immune response is also involved in GVHD, but, in this case, the foreign transplanted immune cells destroy the host tissues. Polypeptides, antibodies, or polynucleotides of the invention, and/or agonists or antagonists thereof, that inhibit an immune response, particularly the activation, proliferation, differentiation, or chemotaxis of T-cells, may be an effective therapy in preventing organ rejection or GVHD. In specific embodiments, polypeptides, antibodies, or polynucleotides of the invention, and/or agonists or antagonists thereof, that inhibit an immune response, particularly the activation, proliferation, differentiation, or chemotaxis of T-cells, may be an effective therapy in preventing experimental allergic and hyperacute xenograft rejection.

[0506] In other embodiments, polypeptides, antibodies, or polynucleotides of the invention, and/or agonists or antagonists thereof, are useful to diagnose, prognose, prevent, and/or treat immune complex diseases, including, but not limited to, serum sickness, post streptococcal glomerulonephritis, polyarteritis nodosa, and immune complex-induced vasculitis.

[0507] Polypeptides, antibodies, polynucleotides and/or agonists or antagonists of the invention can be used to treat, detect, and/or prevent infectious agents. For example, by increasing the immune response, particularly increasing the proliferation activation and/or differentiation of B and/or T cells, infectious diseases may be treated, detected, and/or prevented. The immune response may be increased by either enhancing an existing immune response, or by initiating a new immune response. Alternatively, polynucleotides, polypeptides, antibodies, and/or agonists or antagonists of the present invention may also directly inhibit the infectious agent (refer to section of application listing infectious agents, etc), without necessarily eliciting an immune response.

[0508] In another embodiment, polypeptides, antibodies, polynucleotides and/or agonists or antagonists of the present invention are used as a vaccine adjuvant that enhances immune responsiveness to an antigen. In a specific embodiment, polypeptides, antibodies, polynucleotides and/or agonists or antagonists of the present invention are used as an adjuvant to enhance tumor-specific immune responses.

[0509] In another specific embodiment, polypeptides, antibodies, polynucleotides and/or agonists or antagonists of the present invention are used as an adjuvant to enhance anti-viral immune responses. Anti-viral immune responses that may be enhanced using the compositions of the invention as an adjuvant, include virus and virus associated diseases or symptoms described herein or otherwise known in the art. In specific embodiments, the compositions of the invention are used as an adjuvant to enhance an immune response to a virus, disease, or symptom selected from the group consisting of: AIDS, meningitis, Dengue, EBV, and hepatitis (e.g., hepatitis B). In another specific embodiment, the compositions of the invention are used as an adjuvant to enhance an immune response to a virus, disease, or symptom selected from the group consisting of: HIV/AIDS, respiratory syncytial virus, Dengue, rotavirus, Japanese B encephalitis, influenza A and B, parainfluenza, measles, cytomegalovirus, rabies, Junin, Chikungunya, Rift Valley Fever, herpes simplex, and yellow fever.

[0510] In another specific embodiment, polypeptides, antibodies, polynucleotides and/or agonists or antagonists of the present invention are used as an adjuvant to enhance anti-bacterial or anti-fungal immune responses. Anti-bacterial or anti-fungal immune responses that may be enhanced using the compositions of the invention as an adjuvant, include bacteria or fungus and bacteria or fungus associated diseases or symptoms described herein or otherwise known in the art. In specific embodiments, the compositions of the invention are used as an adjuvant to enhance an immune response to a bacteria or fungus, disease, or symptom selected from the group consisting of: tetanus, Diphtheria, botulism, and meningitis type B.

[0511] In another specific embodiment, the compositions of the invention are used as an adjuvant to enhance an immune response to a bacteria or fungus, disease, or symptom selected from the group consisting of: Vibrio cholerae, Mycobacterium leprae, Salmonella typhi, Salmonella paratyphi, Meisseria meningitidis, Streptococcus pneumoniae, Group B streptococcus, Shigella spp., Enterotoxigenic Escherichia coli, Enterohemorrhagic E. coli, and Borrelia burgdorferi.

[0512] In another specific embodiment, polypeptides, antibodies, polynucleotides and/or agonists or antagonists of the present invention are used as an adjuvant to enhance anti-parasitic immune responses. Anti-parasitic immune responses that may be enhanced using the compositions of the invention as an adjuvant, include parasite and parasite associated diseases or symptoms described herein or otherwise known in the art. In specific embodiments, the compositions of the invention are used as an adjuvant to enhance an immune response to a parasite. In another specific embodiment, the compositions of the invention are used as an adjuvant to enhance an immune response to Plasmodium (malaria) or Leishmania.

[0513] In another specific embodiment, polypeptides, antibodies, polynucleotides and/or agonists or antagonists of the present invention may also be employed to treat infectious diseases including silicosis, sarcoidosis, and idiopathic pulmonary fibrosis; for example, by preventing the recruitment and activation of mononuclear phagocytes.

[0514] In another specific embodiment, polypeptides, antibodies, polynucleotides and/or agonists or antagonists of the present invention are used as an antigen for the generation of antibodies to inhibit or enhance immune mediated responses against polypeptides of the invention.

[0515] In one embodiment, polypeptides, antibodies, polynucleotides and/or agonists or antagonists of the present invention are administered to an animal (e.g., mouse, rat, rabbit, hamster, guinea pig, pigs, micro-pig, chicken, camel, goat, horse, cow, sheep, dog, cat, non-human primate, and human, most preferably human) to boost the immune system to produce increased quantities of one or more antibodies (e.g., IgG, IgA, IgM, and IgE), to induce higher affinity antibody production and immunoglobulin class switching (e.g., IgG, IgA, IgM, and IgE), and/or to increase an immune response.

[0516] In another specific embodiment, polypeptides, antibodies, polynucleotides and/or agonists or antagonists of the present invention are used as a stimulator of B cell responsiveness to pathogens.

[0517] In another specific embodiment, polypeptides, antibodies, polynucleotides and/or agonists or antagonists of the present invention are used as an activator of T cells.

[0518] In another specific embodiment, polypeptides, antibodies, polynucleotides and/or agonists or antagonists of the present invention are used as an agent that elevates the immune status of an individual prior to their receipt of immunosuppressive therapies.

[0519] In another specific embodiment, polypeptides, antibodies, polynucleotides and/or agonists or antagonists of the present invention are used as an agent to induce higher affinity antibodies.

[0520] In another specific embodiment, polypeptides, antibodies, polynucleotides and/or agonists or antagonists of the present invention are used as an agent to increase serum immunoglobulin concentrations.

[0521] In another specific embodiment, polypeptides, antibodies, polynucleotides and/or agonists or antagonists of the present invention are used as an agent to accelerate recovery of immunocompromised individuals.

[0522] In another specific embodiment, polypeptides, antibodies, polynucleotides and/or agonists or antagonists of the present invention are used as an agent to boost immunoresponsiveness among aged populations and/or neonates.

[0523] In another specific embodiment, polypeptides, antibodies, polynucleotides and/or agonists or antagonists of the present invention are used as an immune system enhancer prior to, during, or after bone marrow transplant and/or other transplants (e.g., allogeneic or xenogeneic organ transplantation). With respect to transplantation, compositions of the invention may be administered prior to, concomitant with, and/or after transplantation. In a specific embodiment, compositions of the invention are administered after transplantation, prior to the beginning of recovery of T-cell populations. In another specific embodiment, compositions of the invention are first administered after transplantation after the beginning of recovery of T cell populations, but prior to full recovery of B cell populations.

[0524] In another specific embodiment, polypeptides, antibodies, polynucleotides and/or agonists or antagonists of the present invention are used as an agent to boost immunoresponsiveness among individuals having an acquired loss of B cell function. Conditions resulting in an acquired loss of B cell function that may be ameliorated or treated by administering the polypeptides, antibodies, polynucleotides and/or agonists or antagonists thereof, include, but are not limited to, HIV Infection, AIDS, bone marrow transplant, and B cell chronic lymphocytic leukemia (CLL).

[0525] In another specific embodiment, polypeptides, antibodies, polynucleotides and/or agonists or antagonists of the present invention are used as an agent to boost immunoresponsiveness among individuals having a temporary immune deficiency. Conditions resulting in a temporary immune deficiency that may be ameliorated or treated by administering the polypeptides, antibodies, polynucleotides and/or agonists or antagonists thereof, include, but are not limited to, recovery from viral infections (e.g., influenza), conditions associated with malnutrition, recovery from infectious mononucleosis, or conditions associated with stress, recovery from measles, recovery from blood transfusion, and recovery from surgery.

[0526] In another specific embodiment, polypeptides, antibodies, polynucleotides and/or agonists or antagonists of the present invention are used as a regulator of antigen presentation by monocytes, dendritic cells, and/or B-cells. In one embodiment, polynucleotides, polypeptides, antibodies, and/or agonists or antagonists of the present invention enhance antigen presentation or antagonizes antigen presentation in vitro or in vivo. Moreover, in related embodiments, said enhancement or antagonism of antigen presentation may be useful as an anti-tumor treatment or to modulate the immune system.

[0527] In another specific embodiment, polypeptides, antibodies, polynucleotides and/or agonists or antagonists of the present invention are used as an agent to direct an individual's immune system towards development of a humoral response (i.e. TH2) as opposed to a THI cellular response.

[0528] In another specific embodiment, polypeptides, antibodies, polynucleotides and/or agonists or antagonists of the present invention are used as a means to induce tumor proliferation and thus make it more susceptible to anti-neoplastic agents. For example, multiple myeloma is a slowly dividing disease and is thus refractory to virtually all anti-neoplastic regimens. If these cells were forced to proliferate more rapidly their susceptibility profile would likely change.

[0529] In another specific embodiment, polypeptides, antibodies, polynucleotides and/or agonists or antagonists of the present invention are used as a stimulator of B cell production in pathologies such as AIDS, chronic lymphocyte disorder and/or Common Variable Immunodificiency.

[0530] In another specific embodiment, polypeptides, antibodies, polynucleotides and/or agonists or antagonists of the present invention are used as a therapy for generation and/or regeneration of lymphoid tissues following surgery, trauma or genetic defect. In another specific embodiment, polypeptides, antibodies, polynucleotides and/or agonists or antagonists of the present invention are used in the pretreatment of bone marrow samples prior to transplant.

[0531] In another specific embodiment, polypeptides, antibodies, polynucleotides and/or agonists or antagonists of the present invention are used as a gene-based therapy for genetically inherited disorders resulting in immuno-incompetence/immunodeficiency such as observed among SCID patients.

[0532] In another specific embodiment, polypeptides, antibodies, polynucleotides and/or agonists or antagonists of the present invention are used as a means of activating monocytes/macrophages to defend against parasitic diseases that effect monocytes such as Leishmania.

[0533] In another specific embodiment, polypeptides, antibodies, polynucleotides and/or agonists or antagonists of the present invention are used as a means of regulating secreted cytokines that are elicited by polypeptides of the invention.

[0534] In another embodiment, polypeptides, antibodies, polynucleotides and/or agonists or antagonists of the present invention are used in one or more of the applications decribed herein, as they may apply to veterinary medicine.

[0535] In another specific embodiment, polypeptides, antibodies, polynucleotides and/or agonists or antagonists of the present invention are used as a means of blocking various aspects of immune responses to foreign agents or self. Examples of diseases or conditions in which blocking of certain aspects of immune responses may be desired include autoimmune disorders such as lupus, and arthritis, as well as immunoresponsiveness to skin allergies, inflammation, bowel disease, injury and diseases/disorders associated with pathogens.

[0536] In another specific embodiment, polypeptides, antibodies, polynucleotides and/or agonists or antagonists of the present invention are used as a therapy for preventing the B cell proliferation and Ig secretion associated with autoimmune diseases such as idiopathic thrombocytopenic purpura, systemic lupus erythematosus and multiple sclerosis.

[0537] In another specific embodiment, polypeptides, antibodies, polynucleotides and/or agonists or antagonists of the present invention are used as a inhibitor of B and/or T cell migration in endothelial cells. This activity disrupts tissue architecture or cognate responses and is useful, for example in disrupting immune responses, and blocking sepsis.

[0538] In another specific embodiment, polypeptides, antibodies, polynucleotides and/or agonists or antagonists of the present invention are used as a therapy for chronic hypergammaglobulinemia evident in such diseases as monoclonal gammopathy of undetermined significance (MGUS), Waldenstrom's disease, related idiopathic monoclonal gammopathies, and plasmacytomas.

[0539] In another specific embodiment, polypeptides, antibodies, polynucleotides and/or agonists or antagonists of the present invention may be employed for instance to inhibit polypeptide chemotaxis and activation of macrophages and their precursors, and of neutrophils, basophils, B lymphocytes and some T-cell subsets, e.g., activated and CD8 cytotoxic T cells and natural killer cells, in certain autoimmune and chronic inflammatory and infective diseases. Examples of autoimmune diseases are described herein and include multiple sclerosis, and insulin-dependent diabetes.

[0540] The polypeptides, antibodies, polynucleotides and/or agonists or antagonists of the present invention may also be employed to treat idiopathic hyper-eosinophilic syndrome by, for example, preventing eosinophil production and migration.

[0541] In another specific embodiment, polypeptides, antibodies, polynucleotides and/or agonists or antagonists of the present invention are used to enhance or inhibit complement mediated cell lysis.

[0542] In another specific embodiment, polypeptides, antibodies, polynucleotides and/or agonists or antagonists of the present invention are used to enhance or inhibit antibody dependent cellular cytotoxicity.

[0543] In another specific embodiment, polypeptides, antibodies, polynucleotides and/or agonists or antagonists of the present invention may also be employed for treating atherosclerosis, for example, by preventing monocyte infiltration in the artery wall.

[0544] In another specific embodiment, polypeptides, antibodies, polynucleotides and/or agonists or antagonists of the present invention may be employed to treat adult respiratory distress syndrome (ARDS).

[0545] In another specific embodiment, polypeptides, antibodies, polynucleotides and/or agonists or antagonists of the present invention may be useful for stimulating wound and tissue repair, stimulating angiogenesis, and/or stimulating the repair of vascular or lymphatic diseases or disorders. Additionally, agonists and antagonists of the invention may be used to stimulate the regeneration of mucosal surfaces.

[0546] In a specific embodiment, polynucleotides or polypeptides, and/or agonists thereof are used to diagnose, prognose, treat, and/or prevent a disorder characterized by primary or acquired immunodeficiency, deficient serum immunoglobulin production, recurrent infections, and/or immune system dysfunction. Moreover, polynucleotides or polypeptides, and/or agonists thereof may be used to treat or prevent infections of the joints, bones, skin, and/or parotid glands, blood-bome infections (e.g., sepsis, meningitis, septic arthritis, and/or osteomyelitis), autoimmune diseases (e.g., those disclosed herein), inflammatory disorders, and malignancies, and/or any disease or disorder or condition associated with these infections, diseases, disorders and/or malignancies) including, but not limited to, CVID, other primary immune deficiencies, HIV disease, CLL, recurrent bronchitis, sinusitis, otitis media, conjunctivitis, pneumonia, hepatitis, meningitis, herpes zoster (e.g., severe herpes zoster), and/or pneumocystis camii. Other diseases and disorders that may be prevented, diagnosed, prognosed, and/or treated with polynucleotides or polypeptides, and/or agonists of the present invention include, but are not limited to, HIV infection, HTLV-BLV infection, lymphopenia, phagocyte bactericidal dysfunction anemia, thrombocytopenia, and hemoglobinuria.

[0547] In another embodiment, polynucleotides, polypeptides, antibodies, and/or agonists or antagonists of the present invention are used to treat, and/or diagnose an individual having common variable immunodeficiency disease (“CVID”; also known as acquired agammaglobulinemia” and “acquired hypogammaglobulinemia”) or a subset of this disease.

[0548] In a specific embodiment, polynucleotides, polypeptides, antibodies, and/or agonists or antagonists of the present invention may be used to diagnose, prognose, prevent, and/or treat cancers or neoplasms including immune cell or immune tissue-related cancers or neoplasms. Examples of cancers or neoplasms that may be prevented, diagnosed, or treated by polynucleotides, polypeptides, antibodies, and/or agonists or antagonists of the present invention include, but are not limited to, acute myelogenous leukemia, chronic myelogenous leukemia, Hodgkin's disease, non-Hodgkin's lymphoma, acute lymphocytic anemia (ALL) Chronic lymphocyte leukemia, plasmacytomas, multiple myeloma, Burkitt's lymphoma, EBV-transformed diseases, and/or diseases and disorders described in the section entitled “Hyperproliferative Disorders” elsewhere herein.

[0549] In another specific embodiment, polypeptides, antibodies, polynucleotides and/or agonists or antagonists of the present invention are used as a therapy for decreasing cellular proliferation of Large B-cell Lymphomas.

[0550] In another specific embodiment, polypeptides, antibodies, polynucleotides and/or agonists or antagonists of the present invention are used as a means of decreasing the involvement of B cells and Ig associated with Chronic Myelogenous Leukemia.

[0551] In specific embodiments, the compositions of the invention are used as an agent to boost immunoresponsiveness among B cell immunodeficient individuals, such as, for example, an individual who has undergone a partial or complete splenectomy.

[0552] Antagonists of the invention include, for example, binding and/or inhibitory antibodies, antisense nucleic acids, ribozymes or soluble forms of the polypeptides of the present invention (e.g., Fc fusion protein; see, e.g., Example 9). Agonists of the invention include, for example, binding or stimulatory antibodies, and soluble forms of the polypeptides (e.g., Fc fusion proteins; see, e.g., Example 9). polypeptides, antibodies, polynucleotides and/or agonists or antagonists of the present invention may be employed in a composition with a pharmaceutically acceptable carrier, e.g., as described herein.

[0553] In another embodiment, polypeptides, antibodies, polynucleotides and/or agonists or antagonists of the present invention are administered to an animal (including, but not limited to, those listed above, and also including transgenic animals) incapable of producing functional endogenous antibody molecules or having an otherwise compromised endogenous immune system, but which is capable of producing human immunoglobulin molecules by means of a reconstituted or partially reconstituted immune system from another animal (see, e.g., published PCT Application Nos. WO98/24893, WO/9634096, WO/9633735, and WO/9110741). Administration of polypeptides, antibodies, polynucleotides and/or agonists or antagonists of the present invention to such animals is useful for the generation of monoclonal antibodies against the polypeptides, antibodies, polynucleotides and/or agonists or antagonists of the present invention.

[0554] Blood-related Disorders

[0555] The polynucleotides, polypeptides, antibodies, and/or agonists or antagonists of the present invention may be used to modulate hemostatic (the stopping of bleeding) or thrombolytic (clot dissolving) activity. For example, by increasing hemostatic or thrombolytic activity, polynucleotides or polypeptides, and/or agonists or antagonists of the present invention could be used to treat or prevent blood coagulation diseases, disorders, and/or conditions (e.g., afibrinogenemia, factor deficiencies, hemophilia), blood platelet diseases, disorders, and/or conditions (e.g., thrombocytopenia), or wounds resulting from trauma, surgery, or other causes. Alternatively, polynucleotides, polypeptides, antibodies, and/or agonists or antagonists of the present invention that can decrease hemostatic or thrombolytic activity could be used to inhibit or dissolve clotting. These molecules could be important in the treatment or prevention of heart attacks (infarction), strokes, or scarring.

[0556] In specific embodiments, the polynucleotides, polypeptides, antibodies, and/or agonists or antagonists of the present invention may be used to prevent, diagnose, prognose, and/or treat thrombosis, arterial thrombosis, venous thrombosis, thromboembolism, pulmonary embolism, atherosclerosis, myocardial infarction, transient ischemic attack, unstable angina. In specific embodiments, the polynucleotides, polypeptides, antibodies, and/or agonists or antagonists of the present invention may be used for the prevention of occulsion of saphenous grafts, for reducing the risk of periprocedural thrombosis as might accompany angioplasty procedures, for reducing the risk of stroke in patients with atrial fibrillation including nonrheumatic atrial fibrillation, for reducing the risk of embolism associated with mechanical heart valves and or mitral valves disease. Other uses for the polynucleotides, polypeptides, antibodies, and/or agonists or antagonists of the present invention, include, but are not limited to, the prevention of occlusions in extrcorporeal devices (e.g., intravascular canulas, vascular access shunts in hemodialysis patients, hemodialysis machines, and cardiopulmonary bypass machines).

[0557] In another embodiment, a polypeptide of the invention, or polynucleotides, antibodies, agonists, or antagonists corresponding to that polypeptide, may be used to prevent, diagnose, prognose, and/or treat diseases and disorders of the blood and/or blood forming organs associated with the tissue(s) in which the polypeptide of the invention is expressed, including one, two, three, four, five, or more tissues disclosed in Table 1A, column 8 (Tissue Distribution Library Code).

[0558] The polynucleotides, polypeptides, antibodies, and/or agonists or antagonists of the present invention may be used to modulate hematopoietic activity (the formation of blood cells). For example, the polynucleotides, polypeptides, antibodies, and/or agonists or antagonists of the present invention may be used to increase the quantity of all or subsets of blood cells, such as, for example, erythrocytes, lymphocytes (B or T cells), myeloid cells (e.g., basophils, eosinophils, neutrophils, mast cells, macrophages) and platelets. The ability to decrease the quantity of blood cells or subsets of blood cells may be useful in the prevention, detection, diagnosis and/or treatment of anemias and leukopenias described below. Alternatively, the polynucleotides, polypeptides, antibodies, and/or agonists or antagonists of the present invention may be used to decrease the quantity of all or subsets of blood cells, such as, for example, erythrocytes, lymphocytes (B or T cells), myeloid cells (e.g., basophils, eosinophils, neutrophils, mast cells, macrophages) and platelets. The ability to decrease the quantity of blood cells or subsets of blood cells may be useful in the prevention, detection, diagnosis and/or treatment of leukocytoses, such as, for example eosinophilia.

[0559] The polynucleotides, polypeptides, antibodies, and/or agonists or antagonists of the present invention may be used to prevent, treat, or diagnose blood dyscrasia.

[0560] Anemias are conditions in which the number of red blood cells or amount of hemoglobin (the protein that carries oxygen) in them is below normal. Anemia may be caused by excessive bleeding, decreased red blood cell production, or increased red blood cell destruction (hemolysis). The polynucleotides, polypeptides, antibodies, and/or agonists or antagonists of the present invention may be useful in treating, preventing, and/or diagnosing anemias. Anemias that may be treated prevented or diagnosed by the polynucleotides, polypeptides, antibodies, and/or agonists or antagonists of the present invention include iron deficiency anemia, hypochromic anemia, microcytic anemia, chlorosis, hereditary siderob;astic anemia, idiopathic acquired sideroblastic anemia, red cell aplasia, megaloblastic anemia (e.g., pernicious anemia, (vitamin B12 deficiency) and folic acid deficiency anemia), aplastic anemia, hemolytic anemias (e.g., autoimmune helolytic anemia, microangiopathic hemolytic anemia, and paroxysmal nocturnal hemoglobinuria). The polynucleotides, polypeptides, antibodies, and/or agonists or antagonists of the present invention may be useful in treating, preventing, and/or diagnosing anemias associated with diseases including but not limited to, anemias associated with systemic lupus erythematosus, cancers, lymphomas, chronic renal disease, and enlarged spleens. The polynucleotides, polypeptides, antibodies, and/or agonists or antagonists of the present invention may be useful in treating, preventing, and/or diagnosing anemias arising from drug treatments such as anemias associated with methyldopa, dapsone, and/or sulfadrugs. Additionally, rhe polynucleotides, polypeptides, antibodies, and/or agonists or antagonists of the present invention may be useful in treating, preventing, and/or diagnosing anemias associated with abnormal red blood cell architecture including but not limited to, hereditary spherocytosis, hereditary elliptocytosis, glucose-6-phosphate dehydrogenase deficiency, and sickle cell anemia.

[0561] The polynucleotides, polypeptides, antibodies, and/or agonists or antagonists of the present invention may be useful in treating, preventing, and/or diagnosing hemoglobin abnormalities, (e.g., those associated with sickle cell anemia, hemoglobin C disease, hemoglobin S-C disease, and hemoglobin E disease). Additionally, the polynucleotides, polypeptides, antibodies, and/or agonists or antagonists of the present invention may be useful in diagnosing, prognosing, preventing, and/or treating thalassemias, including, but not limited to major and minor forms of alpha-thalassemia and beta-thalassemia.

[0562] In another embodiment, the polynucleotides, polypeptides, antibodies, and/or agonists or antagonists of the present invention may be useful in diagnosing, prognosing, preventing, and/or treating bleeding disorders including, but not limited to, thrombocytopenia (e.g., idiopathic thrombocytopenic purpura, and thrombotic thrombocytopenic purpura), Von Willebrand's disease, hereditary platelet disorders (e.g., storage pool disease such as Chediak-Higashi and Hermansky-Pudlak syndromes, thromboxane A2 dysfunction, thromboasthenia, and Bemard-Soulier syndrome), hemolytic-uremic syndrome, hemophelias such as hemophelia A or Factor VII deficiency and Christmas disease or Factor IX deficiency, Hereditary Hemorhhagic Telangiectsia, also known as Rendu-Osler-Weber syndrome, allergic purpura (Henoch Schonlein purpura) and disseminated intravascular coagulation.

[0563] The effect of the polynucleotides, polypeptides, antibodies, and/or agonists or antagonists of the present invention on the clotting time of blood may be monitored using any of the clotting tests known in the art including, but not limited to, whole blood partial thromboplastin time (PTT), the activated partial thromboplastin time (aPTT), the activated clotting time (ACT), the recalcified activated clotting time, or the Lee-White Clotting time.

[0564] Several diseases and a variety of drugs can cause platelet dysfunction. Thus, in a specific embodiment, the polynucleotides, polypeptides, antibodies, and/or agonists or antagonists of the present invention may be useful in diagnosing, prognosing, preventing, and/or treating acquired platelet dysfunction such as platelet dysfunction accompanying kidney failure, leukemia, multiple myeloma, cirrhosis of the liver, and systemic lupus erythematosus as well as platelet dysfunction associated with drug treatments, including treatment with aspirin, ticlopidine, nonsteroidal anti-inflammatory drugs (used for arthritis, pain, and sprains), and penicillin in high doses.

[0565] In another embodiment, the polynucleotides, polypeptides, antibodies, and/or agonists or antagonists of the present invention may be useful in diagnosing, prognosing, preventing, and/or treating diseases and disorders characterized by or associated with increased or decreased numbers of white blood cells. Leukopenia occurs when the number of white blood cells decreases below normal. Leukopenias include, but are not limited to, neutropenia and lymphocytopenia. An increase in the number of white blood cells compared to normal is known as leukocytosis. The body generates increased numbers of white blood cells during infection. Thus, leukocytosis may simply be a normal physiological parameter that reflects infection. Alternatively, leukocytosis may be an indicator of injury or other disease such as cancer. Leokocytoses, include but are not limited to, eosinophilia, and accumulations of macrophages. In specific embodiments, the polynucleotides, polypeptides, antibodies, and/or agonists or antagonists of the present invention may be useful in diagnosing, prognosing, preventing, and/or treating leukopenia. In other specific embodiments, the polynucleotides, polypeptides, antibodies, and/or agonists or antagonists of the present invention may be useful in diagnosing, prognosing, preventing, and/or treating leukocytosis.

[0566] Leukopenia may be a generalized decreased in all types of white blood cells, or may be a specific depletion of particular types of white blood cells. Thus, in specific embodiments, the polynucleotides, polypeptides, antibodies, and/or agonists or antagonists of the present invention may be useful in diagnosing, prognosing, preventing, and/or treating decreases in neutrophil numbers, known as neutropenia. Neutropenias that may be diagnosed, prognosed, prevented, and/or treated by the polynucleotides, polypeptides, antibodies, and/or agonists or antagonists of the present invention include, but are not limited to, infantile genetic agranulocytosis, familial neutropenia, cyclic neutropenia, neutropenias resulting from or associated with dietary deficiencies (e.g., vitamin B 12 deficiency or folic acid deficiency), neutropenias resulting from or associated with drug treatments (e.g., antibiotic regimens such as penicillin treatment, sulfonamide treatment, anticoagulant treatment, anticonvulsant drugs, anti-thyroid drugs, and cancer chemotherapy), and neutropenias resulting from increased neutrophil destruction that may occur in association with some bacterial or viral infections, allergic disorders, autoimmune diseases, conditions in which an individual has an enlarged spleen (e.g., Felty syndrome, malaria and sarcoidosis), and some drug treatment regimens.

[0567] The polynucleotides, polypeptides, antibodies, and/or agonists or antagonists of the present invention may be useful in diagnosing, prognosing, preventing, and/or treating lymphocytopenias (decreased numbers of B and/or T lymphocytes), including, but not limited lymphocytopenias resulting from or associated with stress, drug treatments (e.g., drug treatment with corticosteroids, cancer chemotherapies, and/or radiation therapies), AIDS infection and/or other diseases such as, for example, cancer, rheumatoid arthritis, systemic lupus erythematosus, chronic infections, some viral infections and/or hereditary disorders (e.g., DiGeorge syndrome, Wiskott-Aldrich Syndome, severe combined immunodeficiency, ataxia telangiectsia).

[0568] The polynucleotides, polypeptides, antibodies, and/or agonists or antagonists of the present invention may be useful in diagnosing, prognosing, preventing, and/or treating diseases and disorders associated with macrophage numbers and/or macrophage function including, but not limited to, Gaucher's disease, Niemann-Pick disease, Letterer-Siwe disease and Hand-Schuller-Christian disease.

[0569] In another embodiment, the polynucleotides, polypeptides, antibodies, and/or agonists or antagonists of the present invention may be useful in diagnosing, prognosing, preventing, and/or treating diseases and disorders associated with eosinophil numbers and/or eosinophil function including, but not limited to, idiopathic hypereosinophilic syndrome, eosinophilia-myalgia syndrome, and Hand-Schuller-Christian disease.

[0570] In yet another embodiment, the polynucleotides, polypeptides, antibodies, and/or agonists or antagonists of the present invention may be useful in diagnosing, prognosing, preventing, and/or treating leukemias and lymphomas including, but not limited to, acute lymphocytic (lymphpblastic) leukemia (ALL), acute myeloid (myelocytic, myelogenous, myeloblastic, or myelomonocytic) leukemia, chronic lymphocytic leukemia (e.g., B cell leukemias, T cell leukemias, Sezary syndrome, and Hairy cell leukenia), chronic myelocytic (myeloid, myelogenous, or granulocytic) leukemia, Hodgkin's lymphoma, non-hodgkin's lymphoma, Burkitt's lymphoma, and mycosis fungoides.

[0571] In other embodiments, the polynucleotides, polypeptides, antibodies, and/or agonists or antagonists of the present invention may be useful in diagnosing, prognosing, preventing, and/or treating diseases and disorders of plasma cells including, but not limited to, plasma cell dyscrasias, monoclonal gammaopathies, monoclonal gammopathies of undetermined significance, multiple myeloma, macroglobulinemia, Waldenstrom's macroglobulinemia, cryoglobulinemia, and Raynaud's phenomenon.

[0572] In other embodiments, the polynucleotides, polypeptides, antibodies, and/or agonists or antagonists of the present invention may be useful in treating, preventing, and/or diagnosing myeloproliferative disorders, including but not limited to, polycythemia vera, relative polycythemia, secondary polycythemia, myelofibrosis, acute myelofibrosis, agnogenic myelod metaplasia, thrombocythemia, (including both primary and seconday thrombocythemia) and chronic myelocytic leukemia.

[0573] In other embodiments, the polynucleotides, polypeptides, antibodies, and/or agonists or antagonists of the present invention may be useful as a treatment prior to surgery, to increase blood cell production.

[0574] In other embodiments, the polynucleotides, polypeptides, antibodies, and/or agonists or antagonists of the present invention may be useful as an agent to enhance the migration, phagocytosis, superoxide production, antibody dependent cellular cytotoxicity of neutrophils, eosionophils and macrophages.

[0575] In other embodiments, the polynucleotides, polypeptides, antibodies, and/or agonists or antagonists of the present invention may be useful as an agent to increase the number of stem cells in circulation prior to stem cells pheresis. In another specific embodiment, the polynucleotides, polypeptides, antibodies, and/or agonists or antagonists of the present invention may be useful as an agent to increase the number of stem cells in circulation prior to platelet pheresis.

[0576] In other embodiments, the polynucleotides, polypeptides, antibodies, and/or agonists or antagonists of the present invention may be useful as an agent to increase cytokine production.

[0577] In other embodiments, the polynucleotides, polypeptides, antibodies, and/or agonists or antagonists of the present invention may be useful in preventing, diagnosing, and/or treating primary hematopoietic disorders.

[0578] Hyperproliferative Disorders

[0579] In certain embodiments, polynucleotides or polypeptides, or agonists or antagonists of the present invention can be used to treat or detect hyperproliferative disorders, including neoplasms. Polynucleotides or polypeptides, or agonists or antagonists of the present invention may inhibit the proliferation of the disorder through direct or indirect interactions. Alternatively, Polynucleotides or polypeptides, or agonists or antagonists of the present invention may proliferate other cells which can inhibit the hyperproliferative disorder.

[0580] For example, by increasing an immune response, particularly increasing antigenic qualities of the hyperproliferative disorder or by proliferating, differentiating, or mobilizing T-cells, hyperproliferative disorders can be treated. This immune response may be increased by either enhancing an existing immune response, or by initiating a new immune response. Alternatively, decreasing an immune response may also be a method of treating hyperproliferative disorders, such as a chemotherapeutic agent.

[0581] Examples of hyperproliferative disorders that can be treated or detected by polynucleotides or polypeptides, or agonists or antagonists of the present invention include, but are not limited to neoplasms located in the: colon, abdomen, bone, breast, digestive system, liver, pancreas, peritoneum, endocrine glands (adrenal, parathyroid, pituitary, testicles, ovary, thymus, thyroid), eye, head and neck, nervous (central and peripheral), lymphatic system, pelvis, skin, soft tissue, spleen, thorax, and urogenital tract.

[0582] Similarly, other hyperproliferative disorders can also be treated or detected by polynucleotides or polypeptides, or agonists or antagonists of the present invention. Examples of such hyperproliferative disorders include, but are not limited to: Acute Childhood Lymphoblastic Leukemia, Acute Lymphoblastic Leukemia, Acute Lymphocytic Leukemia, Acute Myeloid Leukemia, Adrenocortical Carcinoma, Adult (Primary) Hepatocellular Cancer, Adult (Primary) Liver Cancer, Adult Acute Lymphocytic Leukemia, Adult Acute Myeloid Leukemia, Adult Hodgkin's Disease, Adult Hodgkin's Lymphoma, Adult Lymphocytic Leukemia, Adult Non-Hodgkin's Lymphoma, Adult Primary Liver Cancer, Adult Soft Tissue Sarcoma, AIDS-Related Lymphoma, AIDS-Related Malignancies, Anal Cancer, Astrocytoma, Bile Duct Cancer, Bladder Cancer, Bone Cancer, Brain Stem Glioma, Brain Tumors, Breast Cancer, Cancer of the Renal Pelvis and Ureter, Central Nervous System (Primary) Lymphoma, Central Nervous System Lymphoma, Cerebellar Astrocytoma, Cerebral Astrocytoma, Cervical Cancer, Childhood (Primary) Hepatocellular Cancer, Childhood (Primary) Liver Cancer, Childhood Acute Lymphoblastic Leukemia, Childhood Acute Myeloid Leukemia, Childhood Brain Stem Glioma, Childhood Cerebellar Astrocytoma, Childhood Cerebral Astrocytoma, Childhood Extracranial Germ Cell Tumors, Childhood Hodgkin's Disease, Childhood Hodgkin's Lymphoma, Childhood Hypothalamic and Visual Pathway Glioma, Childhood Lymphoblastic Leukemia, Childhood Medulloblastoma, Childhood Non-Hodgkin's Lymphoma, Childhood Pineal and Supratentorial Primitive Neuroectodermal Tumors, Childhood Primary Liver Cancer, Childhood Rhabdomyosarcoma, Childhood Soft Tissue Sarcoma, Childhood Visual Pathway and Hypothalamic Glioma, Chronic Lymphocytic Leukemia, Chronic Myelogenous Leukemia, Colon Cancer, Cutaneous T-Cell Lymphoma, Endocrine Pancreas Islet Cell Carcinoma, Endometrial Cancer, Ependymoma, Epithelial Cancer, Esophageal Cancer, Ewing's Sarcoma and Related Tumors, Exocrine Pancreatic Cancer, Extracranial Germ Cell Tumor, Extragonadal Germ Cell Tumor, Extrahepatic Bile Duct Cancer, Eye Cancer, Female Breast Cancer, Gaucher's Disease, Gallbladder Cancer, Gastric Cancer, Gastrointestinal Carcinoid Tumor, Gastrointestinal Tumors, Germ Cell Tumors, Gestational Trophoblastic Tumor, Hairy Cell Leukemia, Head and Neck Cancer, Hepatocellular Cancer, Hodgkin's Disease, Hodgkin's Lymphoma, Hypergammaglobulinemia, Hypopharyngeal Cancer, Intestinal Cancers, Intraocular Melanoma, Islet Cell Carcinoma, Islet Cell Pancreatic Cancer, Kaposi's Sarcoma, Kidney Cancer, Laryngeal Cancer, Lip and Oral Cavity Cancer, Liver Cancer, Lung Cancer, Lymphoproliferative Disorders, Macroglobulinemia, Male Breast Cancer, Malignant Mesothelioma, Malignant Thymoma, Medulloblastoma, Melanoma, Mesothelioma, Metastatic Occult Primary Squamous Neck Cancer, Metastatic Primary Squamous Neck Cancer, Metastatic Squamous Neck Cancer, Multiple Myeloma, Multiple Myeloma/Plasma Cell Neoplasm, Myelodysplastic Syndrome, Myelogenous Leukemia, Myeloid Leukemia, Myeloproliferative Disorders, Nasal Cavity and Paranasal Sinus Cancer, Nasopharyngeal Cancer, Neuroblastoma, Non-Hodgkin's Lymphoma During Pregnancy, Nonmelanoma Skin Cancer, Non-Small Cell Lung Cancer, Occult Primary Metastatic Squamous Neck Cancer, Oropharyngeal Cancer, Osteo-/Malignant Fibrous Sarcoma, Osteosarcoma/Malignant Fibrous Histiocytoma, Osteosarcoma/Malignant Fibrous Histiocytoma of Bone, Ovarian Epithelial Cancer, Ovarian Germ Cell Tumor, Ovarian Low Malignant Potential Tumor, Pancreatic Cancer, Paraproteinemias, Purpura, Parathyroid Cancer, Penile Cancer, Pheochromocytoma, Pituitary Tumor, Plasma Cell Neoplasm/Multiple Myeloma, Primary Central Nervous System Lymphoma, Primary Liver Cancer, Prostate Cancer, Rectal Cancer, Renal Cell Cancer, Renal Pelvis and Ureter Cancer, Retinoblastoma, Rhabdomyosarcoma, Salivary Gland Cancer, Sarcoidosis Sarcomas, Sezary Syndrome, Skin Cancer, Small Cell Lung Cancer, Small Intestine Cancer, Soft Tissue Sarcoma, Squamous Neck Cancer, Stomach Cancer, Supratentorial Primitive Neuroectodermal and Pineal Tumors, T-Cell Lymphoma, Testicular Cancer, Thymoma, Thyroid Cancer, Transitional Cell Cancer of the Renal Pelvis and Ureter, Transitional Renal Pelvis and Ureter Cancer, Trophoblastic Tumors, Ureter and Renal Pelvis Cell Cancer, Urethral Cancer, Uterine Cancer, Uterine Sarcoma, Vaginal Cancer, Visual Pathway and Hypothalamic Glioma, Vulvar Cancer, Waldenstrom's Macroglobulinemia, Wilms' Tumor, and any other hyperproliferative disease, besides neoplasia, located in an organ system listed above.

[0583] In another preferred embodiment, polynucleotides or polypeptides, or agonists or antagonists of the present invention are used to diagnose, prognose, prevent, and/or treat premalignant conditions and to prevent progression to a neoplastic or malignant state, including but not limited to those disorders described above. Such uses are indicated in conditions known or suspected of preceding progression to neoplasia or cancer, in particular, where non-neoplastic cell growth consisting of hyperplasia, metaplasia, or most particularly, dysplasia has occurred (for review of such abnormal growth conditions, see Robbins and Angell, 1976, Basic Pathology, 2d Ed., W. B. Saunders Co., Philadelphia, pp. 68-79.)

[0584] Hyperplasia is a form of controlled cell proliferation, involving an increase in cell number in a tissue or organ, without significant alteration in structure or function. Hyperplastic disorders which can be diagnosed, prognosed, prevented, and/or treated with compositions of the invention (including polynucleotides, polypeptides, agonists or antagonists) include, but are not limited to, angiofollicular mediastinal lymph node hyperplasia, angiolymphoid hyperplasia with eosinophilia, atypical melanocytic hyperplasia, basal cell hyperplasia, benign giant lymph node hyperplasia, cementum hyperplasia, congenital adrenal hyperplasia, congenital sebaceous hyperplasia, cystic hyperplasia, cystic hyperplasia of the breast, denture hyperplasia, ductal hyperplasia, endometrial hyperplasia, fibromuscular hyperplasia, focal epithelial hyperplasia, gingival hyperplasia, inflammatory fibrous hyperplasia, inflammatory papillary hyperplasia, intravascular papillary endothelial hyperplasia, nodular hyperplasia of prostate, nodular regenerative hyperplasia, pseudoepitheliomatous hyperplasia, senile sebaceous hyperplasia, and verrucous hyperplasia.

[0585] Metaplasia is a form of controlled cell growth in which one type of adult or fully differentiated cell substitutes for another type of adult cell. Metaplastic disorders which can be diagnosed, prognosed, prevented, and/or treated with compositions of the invention (including polynucleotides, polypeptides, agonists or antagonists) include, but are not limited to, agnogenic myeloid metaplasia, apocrine metaplasia, atypical metaplasia, autoparenchymatous metaplasia, connective tissue metaplasia, epithelial metaplasia, intestinal metaplasia, metaplastic anemia, metaplastic ossification, metaplastic polyps, myeloid metaplasia, primary myeloid metaplasia, secondary myeloid metaplasia, squamous metaplasia, squamous metaplasia of amnion, and symptomatic myeloid metaplasia.

[0586] Dysplasia is frequently a forerunner of cancer, and is found mainly in the epithelia; it is the most disorderly form of non-neoplastic cell growth, involving a loss in individual cell uniformity and in the architectural orientation of cells. Dysplastic cells often have abnormally large, deeply stained nuclei, and exhibit pleomorphism. Dysplasia characteristically occurs where there exists chronic irritation or inflammation. Dysplastic disorders which can be diagnosed, prognosed, prevented, and/or treated with compositions of the invention (including polynucleotides, polypeptides, agonists or antagonists) include, but are not limited to, anhidrotic ectodermal dysplasia, anterofacial dysplasia, asphyxiating thoracic dysplasia, atriodigital dysplasia, bronchopulmonary dysplasia, cerebral dysplasia, cervical dysplasia, chondroectodermal dysplasia, cleidocranial dysplasia, congenital ectodermal dysplasia, craniodiaphysial dysplasia, craniocarpotarsal dysplasia, craniometaphysial dysplasia, dentin dysplasia, diaphysial dysplasia, ectodermal dysplasia, enamel dysplasia, encephalo-ophthalmic dysplasia, dysplasia epiphysialis hemimelia, dysplasia epiphysialis multiplex, dysplasia epiphysialis punctata, epithelial dysplasia, faciodigitogenital dysplasia, familial fibrous dysplasia of jaws, familial white folded dysplasia, fibromuscular dysplasia, fibrous dysplasia of bone, florid osseous dysplasia, hereditary renal-retinal dysplasia, hidrotic ectodermal dysplasia, hypohidrotic ectodermal dysplasia, lymphopenic thymic dysplasia, mammary dysplasia, mandibulofacial dysplasia, metaphysial dysplasia, Mondini dysplasia, monostotic fibrous dysplasia, mucoepithelial dysplasia, multiple epiphysial dysplasia, oculoauriculovertebral dysplasia, oculodentodigital dysplasia, oculovertebral dysplasia, odontogenic dysplasia, ophthalmomandibulomelic dysplasia, periapical cemental dysplasia, polyostotic fibrous dysplasia, pseudoachondroplastic spondyloepiphysial dysplasia, retinal dysplasia, septo-optic dysplasia, spondyloepiphysial dysplasia, and ventriculoradial dysplasia.

[0587] Additional pre-neoplastic disorders which can be diagnosed, prognosed, prevented, and/or treated with compositions of the invention (including polynucleotides, polypeptides, agonists or antagonists) include, but are not limited to, benign dysproliferative disorders (e.g., benign tumors, fibrocystic conditions, tissue hypertrophy, intestinal polyps, colon polyps, and esophageal dysplasia), leukoplakia, keratoses, Bowen's disease, Farmer's Skin, solar cheilitis, and solar keratosis.

[0588] In another embodiment, a polypeptide of the invention, or polynucleotides, antibodies, agonists, or antagonists corresponding to that polypeptide, may be used to diagnose and/or prognose disorders associated with the tissue(s) in which the polypeptide of the invention is expressed, including one, two, three, four, five, or more tissues disclosed in Table 1A, column 8 (Tissue Distribution Library Code).

[0589] In another embodiment, polynucleotides, polypeptides, antibodies, and/or agonists or antagonists of the present invention conjugated to a toxin or a radioactive isotope, as described herein, may be used to treat cancers and neoplasms, including, but not limited to those described herein. In a further preferred embodiment, polynucleotides, polypeptides, antibodies, and/or agonists or antagonists of the present invention conjugated to a toxin or a radioactive isotope, as described herein, may be used to treat acute myelogenous leukemia.

[0590] Additionally, polynucleotides, polypeptides, and/or agonists or antagonists of the invention may affect apoptosis, and therefore, would be useful in treating a number of diseases associated with increased cell survival or the inhibition of apoptosis. For example, diseases associated with increased cell survival or the inhibition of apoptosis that could be diagnosed, prognosed, prevented, and/or treated by polynucleotides, polypeptides, and/or agonists or antagonists of the invention, include cancers (such as follicular lymphomas, carcinomas with p53 mutations, and hormone-dependent tumors, including, but not limited to colon cancer, cardiac tumors, pancreatic cancer, melanoma, retinoblastoma, glioblastoma, lung cancer, intestinal cancer, testicular cancer, stomach cancer, neuroblastoma, myxoma, myoma, lymphoma, endothelioma, osteoblastoma, osteoclastoma, osteosarcoma, chondrosarcoma, adenoma, breast cancer, prostate cancer, Kaposi's sarcoma and ovarian cancer); autoimmune disorders such as, multiple sclerosis, Sjogren's syndrome, Hashimoto's thyroiditis, bitiary cirrhosis, Behcet's disease, Crohn's disease, polymyositis, systemic lupus erythematosus and immune-related glomerulonephritis and rheumatoid arthritis) and viral infections (such as herpes viruses, pox viruses and adenoviruses), inflammation, graft v. host disease, acute graft rejection, and chronic graft rejection.

[0591] In preferred embodiments, polynucleotides, polypeptides, and/or agonists or antagonists of the invention are used to inhibit growth, progression, and/or metastasis of cancers, in particular those listed above.

[0592] Additional diseases or conditions associated with increased cell survival that could be diagnosed, prognosed, prevented, and/or treated by polynucleotides, polypeptides, and/or agonists or antagonists of the invention, include, but are not limited to, progression, and/or metastases of malignancies and related disorders such as leukemia (including acute leukemias (e.g., acute lymphocytic leukemia, acute myelocytic leukemia (including myeloblastic, promyelocytic, myelomonocytic, monocytic, and erythroleukemia)) and chronic leukemias (e.g., chronic myelocytic (granulocytic) leukemia and chronic lymphocytic leukemia)), polycythemia vera, lymphomas (e.g., Hodgkin's disease and non-Hodgkin's disease), multiple myeloma, Waldenstrom's macroglobulinemia, heavy chain disease, and solid tumors including, but not limited to, sarcomas and carcinomas such as fibrosarcoma, myxosarcoma, liposarcoma, chondrosarcoma, osteogenic sarcoma, chordoma, angiosarcoma, endotheliosarcoma, lymphangiosarcoma, lymphangioendotheliosarcoma, synovioma, mesothelioma, Ewing's tumor, leiomyosarcoma, rhabdomyosarcoma, colon carcinoma, pancreatic cancer, breast cancer, ovarian cancer, prostate cancer, squamous cell carcinoma, basal cell carcinoma, adenocarcinoma, sweat gland carcinoma, sebaceous gland carcinoma, papillary carcinoma, papillary adenocarcinomas, cystadenocarcinoma, medullary carcinoma, bronchogenic carcinoma, renal cell carcinoma, hepatoma, bile duct carcinoma, choriocarcinoma, seminoma, embryonal carcinoma, Wilm's tumor, cervical cancer, testicular tumor, lung carcinoma, small cell lung carcinoma, bladder carcinoma, epithelial carcinoma, glioma, astrocytoma, medulloblastoma, craniopharyngioma, ependymoma, pinealoma, emangioblastoma, acoustic neuroma, oligodendroglioma, menangioma, melanoma, neuroblastoma, and retinoblastoma.

[0593] Diseases associated with increased apoptosis that could be diagnosed, prognosed, prevented, and/or treated by polynucleotides, polypeptides, and/or agonists or antagonists of the invention, include AIDS; neurodegenerative disorders (such as Alzheimer's disease, Parkinson's disease, amyotrophic lateral sclerosis, retinitis pigmentosa, cerebellar degeneration and brain tumor or prior associated disease); autoimmune disorders (such as, multiple sclerosis, Sjogren's syndrome, Hashimoto's thyroiditis, biliary cirrhosis, Behcet's disease, Crohn's disease, polymyositis, systemic lupus erythematosus and immune-related glomerulonephritis and rheumatoid arthritis) myelodysplastic syndromes (such as aplastic anemia), graft v. host disease, ischemic injury (such as that caused by myocardial infarction, stroke and reperfusion injury), liver injury (e.g., hepatitis related liver injury, ischemia/reperfusion injury, cholestosis (bile duct injury) and liver cancer); toxin-induced liver disease (such as that caused by alcohol), septic shock, cachexia and anorexia.

[0594] Hyperproliferative diseases and/or disorders that could be diagnosed, prognosed, prevented, and/or treated by polynucleotides, polypeptides, and/or agonists or antagonists of the invention, include, but are not limited to, neoplasms located in the liver, abdomen, bone, breast, digestive system, pancreas, peritoneum, endocrine glands (adrenal, parathyroid, pituitary, testicles, ovary, thymus, thyroid), eye, head and neck, nervous system (central and peripheral), lymphatic system, pelvis, skin, soft tissue, spleen, thorax, and urogenital tract.

[0595] Similarly, other hyperproliferative disorders can also be diagnosed, prognosed, prevented, and/or treated by polynucleotides, polypeptides, and/or agonists or antagonists of the invention. Examples of such hyperproliferative disorders include, but are not limited to: hypergammaglobulinemia, lymphoproliferative disorders, paraproteinemias, purpura, sarcoidosis, Sezary Syndrome, Waldenstron's macroglobulinemia, Gaucher's Disease, histiocytosis, and any other hyperproliferative disease, besides neoplasia, located in an organ system listed above.

[0596] Another preferred embodiment utilizes polynucleotides of the present invention to inhibit aberrant cellular division, by gene therapy using the present invention, and/or protein fusions or fragments thereof.

[0597] Thus, the present invention provides a method for treating cell proliferative disorders by inserting into an abnormally proliferating cell a polynucleotide of the present invention, wherein said polynucleotide represses said expression.

[0598] Another embodiment of the present invention provides a method of treating cell-proliferative disorders in individuals comprising administration of one or more active gene copies of the present invention to an abnormally proliferating cell or cells. In a preferred embodiment, polynucleotides of the present invention is a DNA construct comprising a recombinant expression vector effective in expressing a DNA sequence encoding said polynucleotides. In another preferred embodiment of the present invention, the DNA construct encoding the poynucleotides of the present invention is inserted into cells to be treated utilizing a retrovirus, or more preferably an adenoviral vector (See G J. Nabel, et. al., PNAS 1999 96: 324-326, which is hereby incorporated by reference). In a most preferred embodiment, the viral vector is defective and will not transform non-proliferating cells, only proliferating cells. Moreover, in a preferred embodiment, the polynucleotides of the present invention inserted into proliferating cells either alone, or in combination with or fused to other polynucleotides, can then be modulated via an external stimulus (i.e. magnetic, specific small molecule, chemical, or drug administration, etc.), which acts upon the promoter upstream of said polynucleotides to induce expression of the encoded protein product. As such the beneficial therapeutic affect of the present invention may be expressly modulated (i.e. to increase, decrease, or inhibit expression of the present invention) based upon said external stimulus.

[0599] Polynucleotides of the present invention may be useful in repressing expression of oncogenic genes or antigens. By “repressing expression of the oncogenic genes” is intended the suppression of the transcription of the gene, the degradation of the gene transcript (pre-message RNA), the inhibition of splicing, the destruction of the messenger RNA, the prevention of the post-translational modifications of the protein, the destruction of the protein, or the inhibition of the normal function of the protein.

[0600] For local administration to abnormally proliferating cells, polynucleotides of the present invention may be administered by any method known to those of skill in the art including, but not limited to transfection, electroporation, microinjection of cells, or in vehicles such as liposomes, lipofectin, or as naked polynucleotides, or any other method described throughout the specification. The polynucleotide of the present invention may be delivered by known gene delivery systems such as, but not limited to, retroviral vectors (Gilboa, J. Virology 44:845 (1982); Hocke, Nature 320:275 (1986); Wilson, et al., Proc. Natl. Acad. Sci. U.S.A. 85:3014), vaccinia virus system (Chakrabarty et al., Mol. Cell Biol. 5:3403 (1985) or other efficient DNA delivery systems (Yates et al., Nature 313:812 (1985)) known to those skilled in the art. These references are exemplary only and are hereby incorporated by reference. In order to specifically deliver or transfect cells which are abnormally proliferating and spare non-dividing cells, it is preferable to utilize a retrovirus, or adenoviral (as described in the art and elsewhere herein) delivery system known to those of skill in the art. Since host DNA replication is required for retroviral DNA to integrate and the retrovirus will be unable to self replicate due to the lack of the retrovirus genes needed for its life cycle. Utilizing such a retroviral delivery system for polynucleotides of the present invention will target said gene and constructs to abnormally proliferating cells and will spare the non-dividing normal cells.

[0601] The polynucleotides of the present invention may be delivered directly to cell proliferative disorder/disease sites in internal organs, body cavities and the like by use of imaging devices used to guide an injecting needle directly to the disease site. The polynucleotides of the present invention may also be administered to disease sites at the time of surgical intervention.

[0602] By “cell proliferative disease” is meant any human or animal disease or disorder, affecting any one or any combination of organs, cavities, or body parts, which is characterized by single or multiple local abnormal proliferations of cells, groups of cells, or tissues, whether benign or malignant.

[0603] Any amount of the polynucleotides of the present invention may be administered as long as it has a biologically inhibiting effect on the proliferation of the treated cells. Moreover, it is possible to administer more than one of the polynucleotide of the present invention simultaneously to the same site. By “biologically inhibiting” is meant partial or total growth inhibition as well as decreases in the rate of proliferation or growth of the cells. The biologically inhibitory dose may be determined by assessing the effects of the polynucleotides of the present invention on target malignant or abnormally proliferating cell growth in tissue culture, tumor growth in animals and cell cultures, or any other method known to one of ordinary skill in the art.

[0604] The present invention is further directed to antibody-based therapies which involve administering of anti-polypeptides and anti-polynucleotide antibodies to a mammalian, preferably human, patient for treating one or more of the described disorders. Methods for producing anti-polypeptides and anti-polynucleotide antibodies polyclonal and monoclonal antibodies are described in detail elsewhere herein. Such antibodies may be provided in pharmaceutically acceptable compositions as known in the art or as described herein.

[0605] A summary of the ways in which the antibodies of the present invention may be used therapeutically includes binding polynucleotides or polypeptides of the present invention locally or systemically in the body or by direct cytotoxicity of the antibody, e.g. as mediated by complement (CDC) or by effector cells (ADCC). Some of these approaches are described in more detail below. Armed with the teachings provided herein, one of ordinary skill in the art will know how to use the antibodies of the present invention for diagnostic, monitoring or therapeutic purposes without undue experimentation.

[0606] In particular, the antibodies, fragments and derivatives of the present invention are useful for treating a subject having or developing cell proliferative and/or differentiation disorders as described herein. Such treatment comprises administering a single or multiple doses of the antibody, or a fragment, derivative, or a conjugate thereof.

[0607] The antibodies of this invention may be advantageously utilized in combination with other monoclonal or chimeric antibodies, or with lymphokines or hematopoietic growth factors, for example., which serve to increase the number or activity of effector cells which interact with the antibodies.

[0608] It is preferred to use high affinity and/or potent in vivo inhibiting and/or neutralizing antibodies against polypeptides or polynucleotides of the present invention, fragments or regions thereof, for both immunoassays directed to and therapy of disorders related to polynucleotides or polypeptides, including fragements thereof, of the present invention. Such antibodies, fragments, or regions, will preferably have an affinity for polynucleotides or polypeptides, including fragements thereof. Preferred binding affinities include those with a dissociation constant or Kd less than 5×10⁻⁶M, 10⁻⁶M, 5×10⁻⁷M, 10⁻⁷M, 5×10⁻⁸M, 10⁻⁸M, 5×10⁻⁹M, 10⁻⁹M, 5×10⁻¹⁰M, 10⁻¹⁰M, 5×10⁻¹¹M, 10⁻¹¹M, 5×10⁻¹²M, 10⁻¹²M, 5×10⁻¹³M, 10⁻¹³M, 5×10⁻¹⁴M, 10⁻¹⁴M, 5×10⁻¹⁵M, and 10⁻¹⁵M.

[0609] Moreover, polypeptides of the present invention are useful in inhibiting the angiogenesis of proliferative cells or tissues, either alone, as a protein fusion, or in combination with other polypeptides directly or indirectly, as described elsewhere herein. In a most preferred embodiment, said anti-angiogenesis effect may be achieved indirectly, for example, through the inhibition of hematopoietic, tumor-specific cells, such as tumor-associated macrophages (See Joseph IB, et al. J Natl Cancer Inst, 90(21):1648-53 (1998), which is hereby incorporated by reference). Antibodies directed to polypeptides or polynucleotides of the present invention may also result in inhibition of angiogenesis directly, or indirectly (See Witte L, et al., Cancer Metastasis Rev. 17(2):155-61 (1998), which is hereby incorporated by reference)).

[0610] Polypeptides, including protein fusions, of the present invention, or fragments thereof may be useful in inhibiting proliferative cells or tissues through the induction of apoptosis. Said polypeptides may act either directly, or indirectly to induce apoptosis of proliferative cells and tissues, for example in the activation of a death-domain receptor, such as tumor necrosis factor (TNF) receptor-1, CD95 (Fas/APO-1), TNF-receptor-related apoptosis-mediated protein (TRAMP) and TNF-related apoptosis-inducing ligand (TRAIL) receptor-1 and -2 (See Schulze-Osthoff K, et.al., Eur J Biochem 254(3):439-59 (1998), which is hereby incorporated by reference). Moreover, in another preferred embodiment of the present invention, said polypeptides may induce apoptosis through other mechanisms, such as in the activation of other proteins which will activate apoptosis, or through stimulating the expression of said proteins, either alone or in combination with small molecule drugs or adjuviants, such as apoptonin, galectins, thioredoxins, anti-inflammatory proteins (See for example, Mutat Res 400(1-2):447-55 (1998), Med Hypotheses.50(5):423-33 (1998), Chem Biol Interact. Apr 24;111-112:23-34 (1998), J Mol Med.76(6):402-12 (1998), Int J Tissue React;20(1):3-15 (1998), which are all hereby incorporated by reference).

[0611] Polypeptides, including protein fusions to, or fragments thereof, of the present invention are useful in inhibiting the metastasis of proliferative cells or tissues. Inhibition may occur as a direct result of administering polypeptides, or antibodies directed to said polypeptides as described elsewere herein, or indirectly, such as activating the expression of proteins known to inhibit metastasis, for example alpha 4 integrins, (See, e.g., Curr Top Microbiol Immunol 1998;231:125-41, which is hereby incorporated by reference). Such thereapeutic affects of the present invention may be achieved either alone, or in combination with small molecule drugs or adjuvants.

[0612] In another embodiment, the invention provides a method of delivering compositions containing the polypeptides of the invention (e.g., compositions containing polypeptides or polypeptide antibodes associated with heterologous polypeptides, heterologous nucleic acids, toxins, or prodrugs) to targeted cells expressing the polypeptide of the present invention. Polypeptides or polypeptide antibodes of the invention may be associated with with heterologous polypeptides, heterologous nucleic acids, toxins, or prodrugs via hydrophobic, hydrophilic, ionic and/or covalent interactions.

[0613] Polypeptides, protein fusions to, or fragments thereof, of the present invention are useful in enhancing the immunogenicity and/or antigenicity of proliferating cells or tissues, either directly, such as would occur if the polypeptides of the present invention ‘vaccinated’ the immune response to respond to proliferative antigens and immunogens, or indirectly, such as in activating the expression of proteins known to enhance the immune response (e.g. chemokines), to said antigens and immunogens.

[0614] Renal Disorders

[0615] Polynucleotides, polypeptides, antibodies, and/or agonists or antagonists of the present invention, may be used to treat, prevent, diagnose, and/or prognose disorders of the renal system. Renal disorders which can be diagnosed, prognosed, prevented, and/or treated with compositions of the invention include, but are not limited to, kidney failure, nephritis, blood vessel disorders of kidney, metabolic and congenital kidney disorders, urinary disorders of the kidney, autoimmune disorders, sclerosis and necrosis, electrolyte imbalance, and kidney cancers.

[0616] Kidney diseases which can be diagnosed, prognosed, prevented, and/or treated with compositions of the invention include, but are not limited to, acute kidney failure, chronic kidney failure, atheroembolic renal failure, end-stage renal disease, inflammatory diseases of the kidney (e.g., acute glomerulonephritis, postinfectious glomerulonephritis, rapidly progressive glomerulonephritis, nephrotic syndrome, membranous glomerulonephritis, familial nephrotic syndrome, membranoproliferative glomerulonephritis I and II, mesangial proliferative glomerulonephritis, chronic glomerulonephritis, acute tubulointerstitial nephritis, chronic tubulointerstitial nephritis, acute post-streptococcal glomerulonephritis (PSGN), pyelonephritis, lupus nephritis, chronic nephritis, interstitial nephritis, and post-streptococcal glomerulonephritis), blood vessel disorders of the kidneys (e.g., kidney infarction, atheroembolic kidney disease, cortical necrosis, malignant nephrosclerosis, renal vein thrombosis, renal underperfusion, renal retinopathy, renal ischemia-reperfusion, renal artery embolism, and renal artery stenosis), and kidney disorders resulting form urinary tract disease (e.g., pyelonephritis, hydronephrosis, urolithiasis (renal lithiasis, nephrolithiasis), reflux nephropathy, urinary tract infections, urinary retention, and acute or chronic unilateral obstructive uropathy.)

[0617] In addition, compositions of the invention can be used to diagnose, prognose, prevent, and/or treat metabolic and congenital disorders of the kidney (e.g., uremia, renal amyloidosis, renal osteodystrophy, renal tubular acidosis, renal glycosuria, nephrogenic diabetes insipidus, cystinuria, Fanconi's syndrome, renal fibrocystic osteosis (renal rickets), Hartnup disease, Bartter's syndrome, Liddle's syndrome, polycystic kidney disease, medullary cystic disease, medullary sponge kidney, Alport's syndrome, nail-patella syndrome, congenital nephrotic syndrome, CRUSH syndrome, horseshoe kidney, diabetic nephropathy, nephrogenic diabetes insipidus, analgesic nephropathy, kidney stones, and membranous nephropathy), and autoimmune disorders of the kidney (e.g., systemic lupus erythematosus (SLE), Goodpasture syndrome, IgA nephropathy, and IgM mesangial proliferative glomerulonephritis).

[0618] Compositions of the invention can also be used to diagnose, prognose, prevent, and/or treat sclerotic or necrotic disorders of the kidney (e.g., glomerulosclerosis, diabetic nephropathy, focal segmental glomerulosclerosis (FSGS), necrotizing glomerulonephritis, and renal papillary necrosis), cancers of the kidney (e.g., nephroma, hypernephroma, nephroblastoma, renal cell cancer, transitional cell cancer, renal adenocarcinoma, squamous cell cancer, and Wilm's tumor), and electrolyte imbalances (e.g., nephrocalcinosis, pyuria, edema, hydronephritis, proteinuria, hyponatremia, hypernatremia, hypokalemia, hyperkalemia, hypocalcemia, hypercalcemia, hypophosphatemia, and hyperphosphatemia).

[0619] Polypeptides may be administered using any method known in the art, including, but not limited to, direct needle injection at the delivery site, intravenous injection, topical administration, catheter infusion, biolistic injectors, particle accelerators, gelfoam sponge depots, other commercially available depot materials, osmotic pumps, oral or suppositorial solid pharmaceutical formulations, decanting or topical applications during surgery, aerosol delivery. Such methods are known in the art. Polypeptides may be administered as part of a Therapeutic, described in more detail below. Methods of delivering polynucleotides are described in more detail herein.

[0620] Cardiovascular Disorders

[0621] Polynucleotides or polypeptides, or agonists or antagonists of the present invention, may be used to treat, prevent, diagnose, and/or prognose cardiovascular disorders, including, but not limited to, peripheral artery disease, such as limb ischemia.

[0622] Cardiovascular disorders include, but are not limited to, cardiovascular abnormalities, such as arterio-arterial fistula, arteriovenous fistula, cerebral arteriovenous malformations, congenital heart defects, pulmonary atresia, and Scimitar Syndrome. Congenital heart defects include, but are not limited to, aortic coarctation, cor triatriatum, coronary vessel anomalies, crisscross heart, dextrocardia, patent ductus arteriosus, Ebstein's anomaly, Eisenmenger complex, hypoplastic left heart syndrome, levocardia, tetralogy of fallot, transposition of great vessels, double outlet right ventricle, tricuspid atresia, persistent truncus arteriosus, and heart septal defects, such as aortopulmonary septal defect, endocardial cushion defects, Lutembacher's Syndrome, trilogy of Fallot, ventricular heart septal defects.

[0623] Cardiovascular disorders also include, but are not limited to, heart disease, such as arrhythmias, carcinoid heart disease, high cardiac output, low cardiac output, cardiac tamponade, endocarditis (including bacterial), heart aneurysm, cardiac arrest, congestive heart failure, congestive cardiomyopathy, paroxysmal dyspnea, cardiac edema, heart hypertrophy, congestive cardiomyopathy, left ventricular hypertrophy, right ventricular hypertrophy, post-infarction heart rupture, ventricular septal rupture, heart valve diseases, myocardial diseases, myocardial ischemia, pericardial effusion, pericarditis (including constrictive and tuberculous), pneumopericardium, postpericardiotomy syndrome, pulmonary heart disease, rheumatic heart disease, ventricular dysfunction, hyperemia, cardiovascular pregnancy complications, Scimitar Syndrome, cardiovascular syphilis, and cardiovascular tuberculosis.

[0624] Arrhythmias include, but are not limited to, sinus arrhythmia, atrial fibrillation, atrial flutter, bradycardia, extrasystole, Adams-Stokes Syndrome, bundle-branch block, sinoatrial block, long QT syndrome, parasystole, Lown-Ganong-Levine Syndrome, Mahaim-type pre-excitation syndrome, Wolff-Parkinson-White syndrome, sick sinus syndrome, tachycardias, and ventricular fibrillation. Tachycardias include paroxysmal tachycardia, supraventricular tachycardia, accelerated idioventricular rhythm, atrioventricular nodal reentry tachycardia, ectopic atrial tachycardia, ectopic Junctional tachycardia, sinoatrial nodal reentry tachycardia, sinus tachycardia, Torsades de Pointes, and ventricular tachycardia.

[0625] Heart valve diseases include, but are not limited to, aortic valve insufficiency, aortic valve stenosis, hear murmurs, aortic valve prolapse, mitral valve prolapse, tricuspid valve prolapse, mitral valve insufficiency, mitral valve stenosis, pulmonary atresia, pulmonary valve insufficiency, pulmonary valve stenosis, tricuspid atresia, tricuspid valve insufficiency, and tricuspid valve stenosis.

[0626] Myocardial diseases include, but are not limited to, alcoholic cardiomyopathy, congestive cardiomyopathy, hypertrophic cardiomyopathy, aortic subvalvular stenosis, pulmonary subvalvular stenosis, restrictive cardiomyopathy, Chagas cardiomyopathy, endocardial fibroelastosis, endomyocardial fibrosis, Kearns Syndrome, myocardial reperfusion injury, and myocarditis.

[0627] Myocardial ischemias include, but are not limited to, coronary disease, such as angina pectoris, coronary aneurysm, coronary arteriosclerosis, coronary thrombosis, coronary vasospasm, myocardial infarction and myocardial stunning.

[0628] Cardiovascular diseases also include vascular diseases such as aneurysms, angiodysplasia, angiomatosis, bacillary angiomatosis, Hippel-Lindau Disease, Klippel-Trenaunay-Weber Syndrome, Sturge-Weber Syndrome, angioneurotic edema, aortic diseases, Takayasu's Arteritis, aortitis, Leriche's Syndrome, arterial occlusive diseases, arteritis, enarteritis, polyarteritis nodosa, cerebrovascular disorders, diabetic angiopathies, diabetic retinopathy, embolisms, thrombosis, erythromelalgia, hemorrhoids, hepatic veno-occlusive disease, hypertension, hypotension, ischemia, peripheral vascular diseases, phlebitis, pulmonary veno-occlusive disease, Raynaud's disease, CREST syndrome, retinal vein occlusion, Scimitar syndrome, superior vena cava syndrome, telangiectasia, atacia telangiectasia, hereditary hemorrhagic telangiectasia, varicocele, varicose veins, varicose ulcer, vasculitis, and venous insufficiency.

[0629] Aneurysms include, but are not limited to, dissecting aneurysms, false aneurysms, infected aneurysms, ruptured aneurysms, aortic aneurysms, cerebral aneurysms, coronary aneurysms, heart aneurysms, and iliac aneurysms.

[0630] Arterial occlusive diseases include, but are not limited to, arteriosclerosis, intermittent claudication, carotid stenosis, fibromuscular dysplasias, mesenteric vascular occlusion, Moyamoya disease, renal artery obstruction, retinal artery occlusion, and thromboangiitis obliterans.

[0631] Cerebrovascular disorders include, but are not limited to, carotid artery diseases, cerebral amyloid angiopathy, cerebral aneurysm, cerebral anoxia, cerebral arteriosclerosis, cerebral arteriovenous malformation, cerebral artery diseases, cerebral embolism and thrombosis, carotid artery thrombosis, sinus thrombosis, Wallenberg's syndrome, cerebral hemorrhage, epidural hematoma, subdural hematoma, subaraxhnoid hemorrhage, cerebral infarction, cerebral ischemia (including transient), subclavian steal syndrome, periventricular leukomalacia, vascular headache, cluster headache, migraine, and vertebrobasilar insufficiency.

[0632] Embolisms include, but are not limited to, air embolisms, amniotic fluid embolisms, cholesterol embolisms, blue toe syndrome, fat embolisms, pulmonary embolisms, and thromoboembolisms. Thrombosis include, but are not limited to, coronary thrombosis, hepatic vein thrombosis, retinal vein occlusion, carotid artery thrombosis, sinus thrombosis, Wallenberg's syndrome, and thrombophlebitis.

[0633] Ischemic disorders include, but are not limited to, cerebral ischemia, ischemic colitis, compartment syndromes, anterior compartment syndrome, myocardial ischemia, reperfusion injuries, and peripheral limb ischemia. Vasculitis includes, but is not limited to, aortitis, arteritis, Behcet's Syndrome, Churg-Strauss Syndrome, mucocutaneous lymph node syndrome, thromboangiitis obliterans, hypersensitivity vasculitis, Schoenlein-Henoch purpura, allergic cutaneous vasculitis, and Wegener's granulomatosis.

[0634] Polypeptides may be administered using any method known in the art, including, but not limited to, direct needle injection at the delivery site, intravenous injection, topical administration, catheter infusion, biolistic injectors, particle accelerators, gelfoam sponge depots, other commercially available depot materials, osmotic pumps, oral or suppositorial solid pharmaceutical formulations, decanting or topical applications during surgery, aerosol delivery. Such methods are known in the art. Polypeptides may be administered as part of a Therapeutic, described in more detail below. Methods of delivering polynucleotides are described in more detail herein.

[0635] Respiratory Disorders

[0636] Polynucleotides or polypeptides, or agonists or antagonists of the present invention may be used to treat, prevent, diagnose, and/or prognose diseases and/or disorders of the respiratory system.

[0637] Diseases and disorders of the respiratory system include, but are not limited to, nasal vestibulitis, nonallergic rhinitis (e.g., acute rhinitis, chronic rhinitis, atrophic rhinitis, vasomotor rhinitis), nasal polyps, and sinusitis, juvenile angiofibromas, cancer of the nose and juvenile papillomas, vocal cord polyps, nodules (singer's nodules), contact ulcers, vocal cord paralysis, laryngoceles, pharyngitis (e.g., viral and bacterial), tonsillitis, tonsillar cellulitis, parapharyngeal abscess, laryngitis, laryngoceles, and throat cancers (e.g., cancer of the nasopharynx, tonsil cancer, larynx cancer), lung cancer (e.g., squamous cell carcinoma, small cell (oat cell) carcinoma, large cell carcinoma, and adenocarcinoma), allergic disorders (eosinophilic pneumonia, hypersensitivity pneumonitis (e.g., extrinsic allergic alveolitis, allergic interstitial pneumonitis, organic dust pneumoconiosis, allergic bronchopulmonary aspergillosis, asthma, Wegener's granulomatosis (granulomatous vasculitis), Goodpasture's syndrome)), pneumonia (e.g., bacterial pneumonia (e.g., Streptococcus pneumoniae (pneumoncoccal pneumonia), Staphylococcus aureus (staphylococcal pneumonia), Gram-negative bacterial pneumonia (caused by, e.g., Klebsiella and Pseudomas spp.), Mycoplasma pneumoniae pneumonia, Hemophilus influenzae pneumonia, Legionella pneumophila (Legionnaires' disease), and Chlamydia psittaci (Psittacosis)), and viral pneumonia (e.g., influenza, chickenpox (varicella).

[0638] Additional diseases and disorders of the respiratory system include, but are not limited to bronchiolitis, polio (poliomyelitis), croup, respiratory syncytial viral infection, mumps, erythema infectiosum (fifth disease), roseola infantum, progressive rubella panencephalitis, german measles, and subacute sclerosing panencephalitis), fungal pneumonia (e.g., Histoplasmosis, Coccidioidomycosis, Blastomycosis, fungal infections in people with severely suppressed immune systems (e.g., cryptococcosis, caused by Cryptococcus neoformans; aspergillosis, caused by Aspergillus spp.; candidiasis, caused by Candida; and mucormycosis)), Pneumocystis carinii (pneumocystis pneumonia), atypical pneumonias (e.g., Mycoplasma and Chlamydia spp.), opportunistic infection pneumonia, nosocomial pneumonia, chemical pneumonitis, and aspiration pneumonia, pleural disorders (e.g., pleurisy, pleural effusion, and pneumothorax (e.g., simple spontaneous pneumothorax, complicated spontaneous pneumothorax, tension pneumothorax)), obstructive airway diseases (e.g., asthma, chronic obstructive pulmonary disease (COPD), emphysema, chronic or acute bronchitis), occupational lung diseases (e.g., silicosis, black lung (coal workers' pneumoconiosis), asbestosis, berylliosis, occupational asthsma, byssinosis, and benign pneumoconioses), Infiltrative Lung Disease (e.g., pulmonary fibrosis (e.g., fibrosing alveolitis, usual interstitial pneumonia), idiopathic pulmonary fibrosis, desquamative interstitial pneumonia, lymphoid interstitial pneumonia, histiocytosis X (e.g., Letterer-Siwe disease, Hand-Schüller-Christian disease, eosinophilic granuloma), idiopathic pulmonary hemosiderosis, sarcoidosis and pulmonary alveolar proteinosis), Acute respiratory distress syndrome (also called, e.g., adult respiratory distress syndrome), edema, pulmonary embolism, bronchitis (e.g., viral, bacterial), bronchiectasis, atelectasis, lung abscess (caused by, e.g., Staphylococcus aureus or Legionella pneumophila), and cystic fibrosis.

[0639] Anti-angiogenesis Activity

[0640] The naturally occurring balance between endogenous stimulators and inhibitors of angiogenesis is one in which inhibitory influences predominate. Rastinejad et al., Cell 56:345-355 (1989). In those rare instances in which neovascularization occurs under normal physiological conditions, such as wound healing, organ regeneration, embryonic development, and female reproductive processes, angiogenesis is stringently regulated and spatially and temporally delimited. Under conditions of pathological angiogenesis such as that characterizing solid tumor growth, these regulatory controls fail. Unregulated angiogenesis becomes pathologic and sustains progression of many neoplastic and non-neoplastic diseases. A number of serious diseases are dominated by abnormal neovascularization including solid tumor growth and metastases, arthritis, some types of eye disorders, and psoriasis. See, e.g., reviews by Moses et al., Biotech. 9:630-634 (1991); Folkman et al, N. Engl. J. Med., 333:1757-1763 (1995); Auerbach et al., J. Microvasc. Res. 29:401-411 (1985); Folkman, Advances in Cancer Research, eds. Klein and Weinhouse, Academic Press, New York, pp. 175-203 (1985); Patz, Am. J. Opthalmol. 94:715-743 (1982); and Folkman et al., Science 221:719-725 (1983). In a number of pathological conditions, the process of angiogenesis contributes to the disease state. For example, significant data have accumulated which suggest that the growth of solid tumors is dependent on angiogenesis. Folkman and Klagsbrun, Science 235:442-447 (1987).

[0641] The present invention provides for treatment of diseases or disorders associated with neovascularization by administration of the polynucleotides and/or polypeptides of the invention, as well as agonists or antagonists of the present invention. Malignant and metastatic conditions which can be treated with the polynucleotides and polypeptides, or agonists or antagonists of the invention include, but are not limited to, malignancies, solid tumors, and cancers described herein and otherwise known in the art (for a review of such disorders, see Fishman et al., Medicine, 2d Ed., J. B. Lippincott Co., Philadelphia (1985)).Thus, the present invention provides a method of treating an angiogenesis-related disease and/or disorder, comprising administering to an individual in need thereof a therapeutically effective amount of a polynucleotide, polypeptide, antagonist and/or agonist of the invention. For example, polynucleotides, polypeptides, antagonists and/or agonists may be utilized in a variety of additional methods in order to therapeutically treat a cancer or tumor. Cancers which may be treated with polynucleotides, polypeptides, antagonists and/or agonists include, but are not limited to solid tumors, including prostate, lung, breast, ovarian, stomach, pancreas, larynx, esophagus, testes, liver, parotid, biliary tract, colon, rectum, cervix, uterus, endometrium, kidney, bladder, thyroid cancer; primary tumors and metastases; melanomas; glioblastoma; Kaposi's sarcoma; leiomyosarcoma; non-small cell lung cancer; colorectal cancer; advanced malignancies; and blood born tumors such as leukemias. For example, polynucleotides, polypeptides, antagonists and/or agonists may be delivered topically, in order to treat cancers such as skin cancer, head and neck tumors, breast tumors, and Kaposi's sarcoma.

[0642] Within yet other aspects, polynucleotides, polypeptides, antagonists and/or agonists may be utilized to treat superficial forms of bladder cancer by, for example, intravesical administration. Polynucleotides, polypeptides, antagonists and/or agonists may be delivered directly into the tumor, or near the tumor site, via injection or a catheter. Of course, as the artisan of ordinary skill will appreciate, the appropriate mode of administration will vary according to the cancer to be treated. Other modes of delivery are discussed herein.

[0643] Polynucleotides, polypeptides, antagonists and/or agonists may be useful in treating other disorders, besides cancers, which involve angiogenesis. These disorders include, but are not limited to: benign tumors, for example hemangiomas, acoustic neuromas, neurofibromas, trachomas, and pyogenic granulomas; artheroscleric plaques; ocular angiogenic diseases, for example, diabetic retinopathy, retinopathy of prematurity, macular degeneration, corneal graft rejection, neovascular glaucoma, retrolental fibroplasia, rubeosis, retinoblastoma, uvietis and Pterygia (abnormal blood vessel growth) of the eye; rheumatoid arthritis; psoriasis; delayed wound healing; endometriosis; vasculogenesis; granulations; hypertrophic scars (keloids); nonunion fractures; scleroderma; trachoma; vascular adhesions; myocardial angiogenesis; coronary collaterals; cerebral collaterals; arteriovenous malformations; ischemic limb angiogenesis; Osler-Webber Syndrome; plaque neovascularization; telangiectasia; hemophiliac joints; angiofibroma; fibromuscular dysplasia; wound granulation; Crohn's disease; and atherosclerosis.

[0644] For example, within one aspect of the present invention methods are provided for treating hypertrophic scars and keloids, comprising the step of administering a polynucleotide, polypeptide, antagonist and/or agonist of the invention to a hypertrophic scar or keloid.

[0645] Within one embodiment of the present invention polynucleotides, polypeptides, antagonists and/or agonists of the invention are directly injected into a hypertrophic scar or keloid, in order to prevent the progression of these lesions. This therapy is of particular value in the prophylactic treatment of conditions which are known to result in the development of hypertrophic scars and keloids (e.g., bums), and is preferably initiated after the proliferative phase has had time to progress (approximately 14 days after the initial injury), but before hypertrophic scar or keloid development. As noted above, the present invention also provides methods for treating neovascular diseases of the eye, including for example, corneal neovascularization, neovascular glaucoma, proliferative diabetic retinopathy, retrolental fibroplasia and macular degeneration.

[0646] Moreover, Ocular disorders associated with neovascularization which can be treated with the polynucleotides and polypeptides of the present invention (including agonists and/or antagonists) include, but are not limited to: neovascular glaucoma, diabetic retinopathy, retinoblastoma, retrolental fibroplasia, uveitis, retinopathy of prematurity macular degeneration, corneal graft neovascularization, as well as other eye inflammatory diseases, ocular tumors and diseases associated with choroidal or iris neovascularization. See, e.g., reviews by Waltman et al., Am. J. Ophthal. 85:704-710 (1978) and Gartner et al., Surv. Ophthal. 22:291-312 (1978).

[0647] Thus, within one aspect of the present invention methods are provided for treating neovascular diseases of the eye such as corneal neovascularization (including corneal graft neovascularization), comprising the step of administering to a patient a therapeutically effective amount of a compound (as described above) to the cornea, such that the formation of blood vessels is inhibited. Briefly, the cornea is a tissue which normally lacks blood vessels. In certain pathological conditions however, capillaries may extend into the cornea from the pericorneal vascular plexus of the limbus. When the cornea becomes vascularized, it also becomes clouded, resulting in a decline in the patient's visual acuity. Visual loss may become complete if the cornea completely opacitates. A wide variety of disorders can result in corneal neovascularization, including for example, corneal infections (e.g., trachoma, herpes simplex keratitis, leishmaniasis and onchocerciasis), immunological processes (e.g., graft rejection and Stevens-Johnson's syndrome), alkali burns, trauma, inflammation (of any cause), toxic and nutritional deficiency states, and as a complication of wearing contact lenses.

[0648] Within particularly preferred embodiments of the invention, may be prepared for topical administration in saline (combined with any of the preservatives and antimicrobial agents commonly used in ocular preparations), and administered in eyedrop form. The solution or suspension may be prepared in its pure form and administered several times daily. Alternatively, anti-angiogenic compositions, prepared as described above, may also be administered directly to the cornea. Within preferred embodiments, the anti-angiogenic composition is prepared with a muco-adhesive polymer which binds to cornea. Within further embodiments, the anti-angiogenic factors or anti-angiogenic compositions may be utilized as an adjunct to conventional steroid therapy. Topical therapy may also be useful prophylactically in corneal lesions which are known to have a high probability of inducing an angiogenic response (such as chemical bums). In these instances the treatment, likely in combination with steroids, may be instituted immediately to help prevent subsequent complications.

[0649] Within other embodiments, the compounds described above may be injected directly into the corneal stroma by an ophthalmologist under microscopic guidance. The preferred site of injection may vary with the morphology of the individual lesion, but the goal of the administration would be to place the composition at the advancing front of the vasculature (i.e., interspersed between the blood vessels and the normal cornea). In most cases this would involve perilimbic corneal injection to “protect” the cornea from the advancing blood vessels. This method may also be utilized shortly after a corneal insult in order to prophylactically prevent corneal neovascularization. In this situation the material could be injected in the perilimbic cornea interspersed between the corneal lesion and its undesired potential limbic blood supply. Such methods may also be utilized in a similar fashion to prevent capillary invasion of transplanted corneas. In a sustained-release form injections might only be required 2-3 times per year. A steroid could also be added to the injection solution to reduce inflammation resulting from the injection itself.

[0650] Within another aspect of the present invention, methods are provided for treating neovascular glaucoma, comprising the step of administering to a patient a therapeutically effective amount of a polynucleotide, polypeptide, antagonist and/or agonist to the eye, such that the formation of blood vessels is inhibited. In one embodiment, the compound may be administered topically to the eye in order to treat early forms of neovascular glaucoma. Within other embodiments, the compound may be implanted by injection into the region of the anterior chamber angle. Within other embodiments, the compound may also be placed in any location such that the compound is continuously released into the aqueous humor. Within another aspect of the present invention, methods are provided for treating proliferative diabetic retinopathy, comprising the step of administering to a patient a therapeutically effective amount of a polynucleotide, polypeptide, antagonist and/or agonist to the eyes, such that the formation of blood vessels is inhibited.

[0651] Within particularly preferred embodiments of the invention, proliferative diabetic retinopathy may be treated by injection into the aqueous humor or the vitreous, in order to increase the local concentration of the polynucleotide, polypeptide, antagonist and/or agonist in the retina. Preferably, this treatment should be initiated prior to the acquisition of severe disease requiring photocoagulation.

[0652] Within another aspect of the present invention, methods are provided for treating retrolental fibroplasia, comprising the step of administering to a patient a therapeutically effective amount of a polynucleotide, polypeptide, antagonist and/or agonist to the eye, such that the formation of blood vessels is inhibited. The compound may be administered topically, via intravitreous injection and/or via intraocular implants.

[0653] Additionally, disorders which can be treated with the polynucleotides, polypeptides, agonists and/or agonists include, but are not limited to, hemangioma, arthritis, psoriasis, angiofibroma, atherosclerotic plaques, delayed wound healing, granulations, hemophilic joints, hypertrophic scars, nonunion fractures, Osler-Weber syndrome, pyogenic granuloma, scleroderma, trachoma, and vascular adhesions.

[0654] Moreover, disorders and/or states, which can be treated, prevented, diagnosed, and/or prognosed with the the polynucleotides, polypeptides, agonists and/or agonists of the invention include, but are not limited to, solid tumors, blood born tumors such as leukemias, tumor metastasis, Kaposi's sarcoma, benign tumors, for example hemangiomas, acoustic neuromas, neurofibromas, trachomas, and pyogenic granulomas, rheumatoid arthritis, psoriasis, ocular angiogenic diseases, for example, diabetic retinopathy, retinopathy of prematurity, macular degeneration, corneal graft rejection, neovascular glaucoma, retrolental fibroplasia, rubeosis, retinoblastoma, and uvietis, delayed wound healing, endometriosis, vascluogenesis, granulations, hypertrophic scars (keloids), nonunion fractures, scleroderma, trachoma, vascular adhesions, myocardial angiogenesis, coronary collaterals, cerebral collaterals, arteriovenous malformations, ischemic limb angiogenesis, Osler-Webber Syndrome, plaque neovascularization, telangiectasia, hemophiliac joints, angiofibroma fibromuscular dysplasia, wound granulation, Crohn's disease, atherosclerosis, birth control agent by preventing vascularization required for embryo implantation controlling menstruation, diseases that have angiogenesis as a pathologic consequence such as cat scratch disease (Rochele minalia quintosa), ulcers (Helicobacter pylori), Bartonellosis and bacillary angiomatosis.

[0655] In one aspect of the birth control method, an amount of the compound sufficient to block embryo implantation is administered before or after intercourse and fertilization have occurred, thus providing an effective method of birth control, possibly a “morning after” method. Polynucleotides, polypeptides, agonists and/or agonists may also be used in controlling menstruation or administered as either a peritoneal lavage fluid or for peritoneal implantation in the treatment of endometriosis.

[0656] Polynucleotides, polypeptides, agonists and/or agonists of the present invention may be incorporated into surgical sutures in order to prevent stitch granulomas.

[0657] Polynucleotides, polypeptides, agonists and/or agonists may be utilized in a wide variety of surgical procedures. For example, within one aspect of the present invention a compositions (in the form of, for example, a spray or film) may be utilized to coat or spray an area prior to removal of a tumor, in order to isolate normal surrounding tissues from malignant tissue, and/or to prevent the spread of disease to surrounding tissues. Within other aspects of the present invention, compositions (e.g., in the form of a spray) may be delivered via endoscopic procedures in order to coat tumors, or inhibit angiogenesis in a desired locale. Within yet other aspects of the present invention, surgical meshes which have been coated with anti-angiogenic compositions of the present invention may be utilized in any procedure wherein a surgical mesh might be utilized. For example, within one embodiment of the invention a surgical mesh laden with an anti-angiogenic composition may be utilized during abdominal cancer resection surgery (e.g., subsequent to colon resection) in order to provide support to the structure, and to release an amount of the anti-angiogenic factor.

[0658] Within further aspects of the present invention, methods are provided for treating tumor excision sites, comprising administering a polynucleotide, polypeptide, agonist and/or agonist to the resection margins of a tumor subsequent to excision, such that the local recurrence of cancer and the formation of new blood vessels at the site is inhibited. Within one embodiment of the invention, the anti-angiogenic compound is administered directly to the tumor excision site (e.g., applied by swabbing, brushing or otherwise coating the resection margins of the tumor with the anti-angiogenic compound). Alternatively, the anti-angiogenic compounds may be incorporated into known surgical pastes prior to administration. Within particularly preferred embodiments of the invention, the anti-angiogenic compounds are applied after hepatic resections for malignancy, and after neurosurgical operations.

[0659] Within one aspect of the present invention, polynucleotides, polypeptides, agonists and/or agonists may be administered to the resection margin of a wide variety of tumors, including for example, breast, colon, brain and hepatic tumors. For example, within one embodiment of the invention, anti-anglogenic compounds may be administered to the site of a neurological tumor subsequent to excision, such that the formation of new blood vessels at the site are inhibited.

[0660] The polynucleotides, polypeptides, agonists and/or agonists of the present invention may also be administered along with other anti-angiogenic factors. Representative examples of other anti-angiogenic factors include: Anti-Invasive Factor, retinoic acid and derivatives thereof, paclitaxel, Suramin, Tissue Inhibitor of Metalloproteinase-1, Tissue Inhibitor of Metalloproteinase-2, Plasminogen Activator Inhibitor-1, Plasminogen Activator Inhibitor-2, and various forms of the lighter “d group” transition metals.

[0661] Lighter “d group” transition metals include, for example, vanadium, molybdenum, tungsten, titanium, niobium, and tantalum species. Such transition metal species may form transition metal complexes. Suitable complexes of the above-mentioned transition metal species include oxo transition metal complexes.

[0662] Representative examples of vanadium complexes include oxo vanadium complexes such as vanadate and vanadyl complexes. Suitable vanadate complexes include metavanadate and orthovanadate complexes such as, for example, ammonium metavanadate, sodium metavanadate, and sodium orthovanadate. Suitable vanadyl complexes include, for example, vanadyl acetylacetonate and vanadyl sulfate including vanadyl sulfate hydrates such as vanadyl sulfate mono- and trihydrates.

[0663] Representative examples of tungsten and molybdenum complexes also include oxo complexes. Suitable oxo tungsten complexes include tungstate and tungsten oxide complexes. Suitable tungstate complexes include ammonium tungstate, calcium tungstate, sodium tungstate dihydrate, and tungstic acid. Suitable tungsten oxides include tungsten (IV) oxide and tungsten (VI) oxide. Suitable oxo molybdenum complexes include molybdate, molybdenum oxide, and molybdenyl complexes. Suitable molybdate complexes include ammonium molybdate and its hydrates, sodium molybdate and its hydrates, and potassium molybdate and its hydrates. Suitable molybdenum oxides include molybdenum (VI) oxide, molybdenum (VI) oxide, and molybdic acid. Suitable molybdenyl complexes include, for example, molybdenyl acetylacetonate. Other suitable tungsten and molybdenum complexes include hydroxo derivatives derived from, for example, glycerol, tartaric acid, and sugars.

[0664] A wide variety of other anti-angiogenic factors may also be utilized within the context of the present invention. Representative examples include platelet factor 4; protamine sulphate; sulphated chitin derivatives (prepared from queen crab shells), (Murata et al., Cancer Res. 51:22-26, 1991); Sulphated Polysaccharide Peptidoglycan Complex (SPPG) (the function of this compound may be enhanced by the presence of steroids such as estrogen, and tamoxifen citrate); Staurosporine; modulators of matrix metabolism, including for example, proline analogs, cishydroxyproline, d,L-3,4-dehydroproline, Thiaproline, alpha,alpha-dipyridyl, aminopropionitrile fumarate; 4-propyl-5-(4-pyridinyl)-2(3H)-oxazolone; Methotrexate; Mitoxantrone; Heparin; Interferons; 2 Macroglobulin-serum; ChIMP-3 (Pavloff et al., J. Bio. Chem. 267:17321-17326, 1992); Chymostatin (Tomkinson et al., Biochem J. 286:475-480, 1992); Cyclodextrin Tetradecasulfate; Eponemycin; Camptothecin; Fumagillin (Ingber et al., Nature 348:555-557, 1990); Gold Sodium Thiomalate (“GST”; Matsubara and Ziff, J. Clin. Invest. 79:1440-1446, 1987); anticollagenase-serum; alpha2-antiplasmin (Holmes et al., J. Biol. Chem. 262(4):1659-1664, 1987); Bisantrene (National Cancer Institute); Lobenzarit disodium (N-(2)-carboxyphenyl-4-chloroanthronilic acid disodium or “CCA”; Takeuchi et al., Agents Actions 36:312-316, 1992); Thalidomide; Angostatic steroid; AGM-1470; carboxynaminolmidazole; and metalloproteinase inhibitors such as BB94.

[0665] Diseases at the Cellular Level

[0666] Diseases associated with increased cell survival or the inhibition of apoptosis that could be treated, prevented, diagnosed, and/or prognosed using polynucleotides or polypeptides, as well as antagonists or agonists of the present invention, include cancers (such as follicular lymphomas, carcinomas with p53 mutations, and hormone-dependent tumors, including, but not limited to colon cancer, cardiac tumors, pancreatic cancer, melanoma, retinoblastoma, glioblastoma, lung cancer, intestinal cancer, testicular cancer, stomach cancer, neuroblastoma, myxoma, myoma, lymphoma, endothelioma, osteoblastoma, osteoclastoma, osteosarcoma, chondrosarcoma, adenoma, breast cancer, prostate cancer, Kaposi's sarcoma and ovarian cancer); autoimmune disorders (such as, multiple sclerosis, Sjogren's syndrome, Hashimoto's thyroiditis, biliary cirrhosis, Behcet's disease, Crohn's disease, polymyositis, systemic lupus erythematosus and immune-related glomerulonephritis and rheumatoid arthritis) and viral infections (such as herpes viruses, pox viruses and adenoviruses), inflammation, graft v. host disease, acute graft rejection, and chronic graft rejection.

[0667] In preferred embodiments, polynucleotides, polypeptides, and/or antagonists of the invention are used to inhibit growth, progression, and/or metasis of cancers, in particular those listed above.

[0668] Additional diseases or conditions associated with increased cell survival that could be treated or detected by polynucleotides or polypeptides, or agonists or antagonists of the present invention include, but are not limited to, progression, and/or metastases of malignancies and related disorders such as leukemia (including acute leukemias (e.g., acute lymphocytic leukemia, acute myelocytic leukemia (including myeloblastic, promyelocytic, myelomonocytic, monocytic, and erythroleukemia)) and chronic leukemias (e.g., chronic myelocytic (granulocytic) leukemia and chronic lymphocytic leukemia)), polycythemia vera, lymphomas (e.g., Hodgkin's disease and non-Hodgkin's disease), multiple myeloma, Waldenstrom's macroglobulinemia, heavy chain disease, and solid tumors including, but not limited to, sarcomas and carcinomas such as fibrosarcoma, myxosarcoma, liposarcoma, cbondrosarcoma, osteogenic sarcoma, chordoma, angiosarcoma, endotheliosarcoma, lymphangiosarcoma, lymphangioendotheliosarcoma, synovioma, mesothelioma, Ewing's tumor, leiomyosarcoma, rhabdomyosarcoma, colon carcinoma, pancreatic cancer, breast cancer, ovarian cancer, prostate cancer, squamous cell carcinoma, basal cell carcinoma, adenocarcinoma, sweat gland carcinoma, sebaceous gland carcinoma, papillary carcinoma, papillary adenocarcinomas, cystadenocarcinoma, medullary carcinoma, bronchogenic carcinoma, renal cell carcinoma, hepatoma, bile duct carcinoma, choriocarcinoma, seminoma, embryonal carcinoma, Wilm's tumor, cervical cancer, testicular tumor, lung carcinoma, small cell lung carcinoma, bladder carcinoma, epithelial carcinoma, glioma, astrocytoma, medulloblastoma, craniopharyngioma, ependymoma, pinealoma, hemangioblastoma, acoustic neuroma, oligodendroglioma, menangioma, melanoma, neuroblastoma, and retinoblastoma.

[0669] Diseases associated with increased apoptosis that could be treated, prevented, diagnosed, and/or prognesed using polynucleotides or polypeptides, as well as agonists or antagonists of the present invention, include, but are not limited to, AIDS; neurodegenerative disorders (such as Alzheimer's disease, Parkinson's disease, Amyotrophic lateral sclerosis, Retinitis pigmentosa, Cerebellar degeneration and brain tumor or prior associated disease); autoimmune disorders (such as, multiple sclerosis, Sjogren's syndrome, Hashimoto's thyroiditis, biliary cirrhosis, Behcet's disease, Crohn's disease, polymyositis, systemic lupus erythematosus and immune-related glomerulonephritis and rheumatoid arthritis) myelodysplastic syndromes (such as aplastic anemia), graft v. host disease, ischemic injury (such as that caused by myocardial infarction, stroke and reperfusion injury), liver injury (e.g., hepatitis related liver injury, ischemia/reperfusion injury, cholestosis (bile duct injury) and liver cancer); toxin-induced liver disease (such as that caused by alcohol), septic shock, cachexia and anorexia.

[0670] Wound Healing and Epithelial Cell Proliferation

[0671] In accordance with yet a further aspect of the present invention, there is provided a process for utilizing polynucleotides or polypeptides, as well as agonists or antagonists of the present invention, for therapeutic purposes, for example, to stimulate epithelial cell proliferation and basal keratinocytes for the purpose of wound healing, and to stimulate hair follicle production and healing of dermal wounds. Polynucleotides or polypeptides, as well as agonists or antagonists of the present invention, may be clinically useful in stimulating wound healing including surgical wounds, excisional wounds, deep wounds involving damage of the dermis and epidermis, eye tissue wounds, dental tissue wounds, oral cavity wounds, diabetic ulcers, dermal ulcers, cubitus ulcers, arterial ulcers, venous stasis ulcers, bums resulting from heat exposure or chemicals, and other abnormal wound healing conditions such as uremia, malnutrition, vitamin deficiencies and complications associated with systemic treatment with steroids, radiation therapy and antineoplastic drugs and antimetabolites. Polynucleotides or polypeptides, as well as agonists or antagonists of the present invention, could be used to promote dermal reestablishment subsequent to dermal loss

[0672] Polynucleotides or polypeptides, as well as agonists or antagonists of the present invention, could be used to increase the adherence of skin grafts to a wound bed and to stimulate re-epithelialization from the wound bed. The following are types of grafts that polynucleotides or polypeptides, agonists or antagonists of the present invention, could be used to increase adherence to a wound bed: autografts, artificial skin, allografts, autodernic graft, autoepdermic grafts, avacular grafts, Blair-Brown grafts, bone graft, brephoplastic grafts, cutis graft, delayed graft, dermic graft, epidermic graft, fascia graft, full thickness graft, heterologous graft, xenograft, homologous graft, hyperplastic graft, lamellar graft, mesh graft, mucosal graft, Ollier-Thiersch graft, omenpal graft, patch graft, pedicle graft, penetrating graft, split skin graft, thick split graft. Polynucleotides or polypeptides, as well as agonists or antagonists of the present invention, can be used to promote skin strength and to improve the appearance of aged skin.

[0673] It is believed that polynucleotides or polypeptides, as well as agonists or antagonists of the present invention, will also produce changes in hepatocyte proliferation, and epithelial cell proliferation in the lung, breast, pancreas, stomach, small intestine, and large intestine. Polynucleotides or polypeptides, as well as agonists or antagonists of the present invention, could promote proliferation of epithelial cells such as sebocytes, hair follicles, hepatocytes, type II pneumocytes, mucin-producing goblet cells, and other epithelial cells and their progenitors contained within the skin, lung, liver, and gastrointestinal tract. Polynucleotides or polypeptides, agonists or antagonists of the present invention, may promote proliferation of endothelial cells, keratinocytes, and basal keratinocytes.

[0674] Polynucleotides or polypeptides, as well as agonists or antagonists of the present invention, could also be used to reduce the side effects of gut toxicity that result from radiation, chemotherapy treatments or viral infections. Polynucleotides or polypeptides, as well as agonists or antagonists of the present invention, may have a cytoprotective effect on the small intestine mucosa. Polynucleotides or polypeptides, as well as agonists or antagonists of the present invention, may also stimulate healing of mucositis (mouth ulcers) that result from chemotherapy and viral infections.

[0675] Polynucleotides or polypeptides, as well as agonists or antagonists of the present invention, could further be used in full regeneration of skin in full and partial thickness skin defects, including bums, (i.e., repopulation of hair follicles, sweat glands, and sebaceous glands), treatment of other skin defects such as psoriasis. Polynucleotides or polypeptides, as well as agonists or antagonists of the present invention, could be used to treat epidermolysis bullosa, a defect in adherence of the epidermis to the underlying dermis which results in frequent, open arid painful blisters by accelerating reepithelialization of these lesions. Polynucleotides or polypeptides, as well as agonists or antagonists of the present invention, could also be used to treat gastric and doudenal ulcers and help heal by scar formation of the mucosal lining and regeneration of glandular mucosa and duodenal mucosal lining more rapidly. Inflammatory bowel diseases, such as Crohn's disease and ulcerative colitis, are diseases which result in destruction of the mucosal surface of the small or large intestine, respectively. Thus, polynucleotides or polypeptides, as well as agonists or antagonists of the present invention, could be used to promote the resurfacing of the mucosal surface to aid more rapid healing and to prevent progression of inflammatory bowel disease. Treatment with polynucleotides or polypeptides, agonists or antagonists of the present invention, is expected to have a significant effect on the production of mucus throughout the gastrointestinal tract and could be used to protect the intestinal mucosa from injurious substances that are ingested or following surgery. Polynucleotides or polypeptides, as well as agonists or antagonists of the present invention, could be used to treat diseases associate with the under expression.

[0676] Moreover, polynucleotides or polypeptides, as well as agonists or antagonists of the present invention, could be used to prevent and heal damage to the lungs due to various pathological states. Polynucleotides or polypeptides, as well as agonists or antagonists of the present invention, which could stimulate proliferation and differentiation and promote the repair of alveoli and brochiolar epithelium to prevent or treat acute or chronic lung damage. For example, emphysema, which results in the progressive loss of aveoli, and inhalation injuries, i.e., resulting from smoke inhalation and bums, that cause necrosis of the bronchiolar epithelium and alveoli could be effectively treated using polynucleotides or polypeptides, agonists or antagonists of the present invention. Also, polynucleotides or polypeptides, as well as agonists or antagonists of the present invention, could be used to stimulate the proliferation of and differentiation of type II pneumocytes, which may help treat or prevent disease such as hyaline membrane diseases, such as infant respiratory distress syndrome and bronchopulmonary displasia, in premature infants.

[0677] Polynucleotides or polypeptides, as well as agonists or antagonists of the present invention, could stimulate the proliferation and differentiation of hepatocytes and, thus, could be used to alleviate or treat liver diseases and pathologies such as fulminant liver failure caused by cirrhosis, liver damage caused by viral hepatitis and toxic substances (i.e., acetaminophen, carbon tetraholoride and other hepatotoxins known in the art).

[0678] In addition, polynucleotides or polypeptides, as well as agonists or antagonists of the present invention, could be used treat or prevent the onset of diabetes mellitus. In patients with newly diagnosed Types I and II diabetes, where some islet cell function remains, polynucleotides or polypeptides, as well as agonists or antagonists of the present invention, could be used to maintain the islet function so as to alleviate, delay or prevent permanent manifestation of the disease. Also, polynucleotides or polypeptides, as well as agonists or antagonists of the present invention, could be used as an auxiliary in islet cell transplantation to improve or promote islet cell function.

[0679] Neural Activity and Neurological Diseases

[0680] The polynucleotides, polypeptides and agonists or antagonists of the invention may be used for the diagnosis and/or treatment of diseases, disorders, damage or injury of the brain and/or nervous system. Nervous system disorders that can be treated with the compositions of the invention (e.g., polypeptides, polynucleotides, and/or agonists or antagonists), include, but are not limited to, nervous system injuries, and diseases or disorders which result in either a disconnection of axons, a diminution or degeneration of neurons, or demyelination. Nervous system lesions which may be treated in a patient (including human and non-human mammalian patients) according to the methods of the invention, include but are not limited to, the following lesions of either the central (including spinal cord, brain) or peripheral nervous systems: (1) ischemic lesions, in which a lack of oxygen in a portion of the nervous system results in neuronal injury or death, including cerebral infarction or ischemia, or spinal cord infarction or ischemia; (2) traumatic lesions, including lesions caused by physical injury or associated with surgery, for example, lesions which sever a portion of the nervous system, or compression injuries; (3) malignant lesions, in which a portion of the nervous system is destroyed or injured by malignant tissue which is either a nervous system associated malignancy or a malignancy derived from non-nervous system tissue; (4) infectious lesions, in which a portion of the nervous system is destroyed or injured as a result of infection, for example, by an abscess or associated with infection by human immunodeficiency virus, herpes zoster, or herpes simplex virus or with Lyme disease, tuberculosis, or syphilis; (5) degenerative lesions, in which a portion of the nervous system is destroyed or injured as a result of a degenerative process including but not limited to, degeneration associated with Parkinson's disease, Alzheimer's disease, Huntington's chorea, or amyotrophic lateral sclerosis (ALS); (6) lesions associated with nutritional diseases or disorders, in which a portion of the nervous system is destroyed or injured by a nutritional disorder or disorder of metabolism including, but not limited to, vitamin B12 deficiency, folic acid deficiency, Wernicke disease, tobacco-alcohol amblyopia, Marchiafava-Bignami disease (primary degeneration of the corpus callosum), and alcoholic cerebellar degeneration; (7) neurological lesions associated with systemic diseases including, but not limited to, diabetes (diabetic neuropathy, Bell's palsy), systemic lupus erythematosus, carcinoma, or sarcoidosis; (8) lesions caused by toxic substances including alcohol, lead, or particular neurotoxins; and (9) demyelinated lesions in which a portion of the nervous system is destroyed or injured by a demyelinating disease including, but not limited to, multiple sclerosis, human immunodeficiency virus-associated myelopathy, transverse myelopathy or various etiologies, progressive multifocal leukoencephalopathy, and central pontine myelinolysis.

[0681] In one embodiment, the polypeptides, polynucleotides, or agonists or antagonists of the invention are used to protect neural cells from the damaging effects of hypoxia. In a further preferred embodiment, the polypeptides, polynucleotides, or agonists or antagonists of the invention are used to protect neural cells from the damaging effects of cerebral hypoxia. According to this embodiment, the compositions of the invention are used to treat or prevent neural cell injury associated with cerebral hypoxia. In one non-exclusive aspect of this embodiment, the polypeptides, polynucleotides, or agonists or antagonists of the invention, are used to treat or prevent neural cell injury associated with cerebral ischemia. In another non-exclusive aspect of this embodiment, the polypeptides, polynucleotides, or agonists or antagonists of the invention are used to treat or prevent neural cell injury associated with cerebral infarction.

[0682] In another preferred embodiment, the polypeptides, polynucleotides, or agonists or antagonists of the invention are used to treat or prevent neural cell injury associated with a stroke. In a specific embodiment, the polypeptides, polynucleotides, or agonists or antagonists of the invention are used to treat or prevent cerebral neural cell injury associated with a stroke.

[0683] In another preferred embodiment, the polypeptides, polynucleotides, or agonists or antagonists of the invention are used to treat or prevent neural cell injury associated with a heart attack. In a specific embodiment, the polypeptides, polynucleotides, or agonists or antagonists of the invention are used to treat or prevent cerebral neural cell injury associated with a heart attack.

[0684] The compositions of the invention which are useful for treating or preventing a nervous system disorder may be selected by testing for biological activity in promoting the survival or differentiation of neurons. For example, and not by way of limitation, compositions of the invention which elicit any of the following effects may be useful according to the invention: (1) increased survival time of neurons in culture either in the presence or absence of hypoxia or hypoxic conditions; (2) increased sprouting of neurons in culture or in vivo; (3) increased production of a neuron-associated molecule in culture or in vivo, e.g., choline acetyltransferase or acetylcholinesterase with respect to motor neurons; or (4) decreased symptoms of neuron dysfunction in vivo. Such effects may be measured by any method known in the art. In preferred, non-limiting embodiments, increased survival of neurons may routinely be measured using a method set forth herein or otherwise known in the art, such as, for example, in Zhang et al., Proc Natl Acad Sci USA 97:3637-42 (2000) or in Arakawa et al., J. Neurosci., 10:3507-15 (1990); increased sprouting of neurons may be detected by methods known in the art, such as, for example, the methods set forth in Pestronk et al., Exp. Neurol., 70:65-82 (1980), or Brown et al., Ann. Rev. Neurosci., 4:17-42 (1981); increased production of neuron-associated molecules may be measured by bioassay, enzymatic assay, antibody binding, Northern blot assay, etc., using techniques known in the art and depending on the molecule to be measured; and motor neuron dysfunction may be measured by assessing the physical manifestation of motor neuron disorder, e.g., weakness, motor neuron conduction velocity, or functional disability.

[0685] In specific embodiments, motor neuron disorders that may be treated according to the invention include, but are not limited to, disorders such as infarction, infection, exposure to toxin, trauma, surgical damage, degenerative disease or malignancy that may affect motor neurons as well as other components of the nervous system, as well as disorders that selectively affect neurons such as amyotrophic lateral sclerosis, and including, but not limited to, progressive spinal muscular atrophy, progressive bulbar palsy, primary lateral sclerosis, infantile and juvenile muscular atrophy, progressive bulbar paralysis of childhood (Fazio-Londe syndrome), poliomyelitis and the post polio syndrome, and Hereditary Motorsensory Neuropathy (Charcot-Marie-Tooth Disease).

[0686] Further, polypeptides or polynucleotides of the invention may play a role in neuronal survival; synapse formation; conductance; neural differentiation, etc. Thus, compositions of the invention (including polynucleotides, polypeptides, and agonists or antagonists) may be used to diagnose and/or treat or prevent diseases or disorders associated with these roles, including, but not limited to, learning and/or cognition disorders. The compositions of the invention may also be useful in the treatment or prevention of neurodegenerative disease states and/or behavioural disorders. Such neurodegenerative disease states and/or behavioral disorders include, but are not limited to, Alzheimer's Disease, Parkinson's Disease, Huntington's Disease, Tourette Syndrome, schizophrenia, mania, dementia, paranoia, obsessive compulsive disorder, panic disorder, learning disabilities, ALS, psychoses, autism, and altered behaviors, including disorders in feeding, sleep patterns, balance, and perception. In addition, compositions of the invention may also play a role in the treatment, prevention and/or detection of developmental disorders associated with the developing embryo, or sexually-linked disorders.

[0687] Additionally, polypeptides, polynucleotides and/or agonists or antagonists of the invention, may be useful in protecting neural cells from diseases, damage, disorders, or injury, associated with cerebrovascular disorders including, but not limited to, carotid artery diseases (e.g., carotid artery thrombosis, carotid stenosis, or Moyamoya Disease), cerebral amyloid angiopathy, cerebral aneurysm, cerebral anoxia, cerebral arteriosclerosis, cerebral arteriovenous malformations, cerebral artery diseases, cerebral embolism and thrombosis (e.g., carotid artery thrombosis, sinus thrombosis, or Wallenberg's Syndrome), cerebral hemorrhage (e.g., epidural or subdural hematoma, or subarachnoid hemorrhage), cerebral infarction, cerebral ischemia (e.g., transient cerebral ischemia, Subclavian Steal Syndrome, or vertebrobasilar insufficiency), vascular dementia (e.g., multi-infarct), leukomalacia, periventricular, and vascular headache (e.g., cluster headache or migraines).

[0688] In accordance with yet a further aspect of the present invention, there is provided a process for utilizing polynucleotides or polypeptides, as well as agonists or antagonists of the present invention, for therapeutic purposes, for example, to stimulate neurological cell proliferation and/or differentiation. Therefore, polynucleotides, polypeptides, agonists and/or antagonists of the invention may be used to treat and/or detect neurologic diseases. Moreover, polynucleotides or polypeptides, or agonists or antagonists of the invention, can be used as a marker or detector of a particular nervous system disease or disorder.

[0689] Examples of neurologic diseases which can be treated or detected with polynucleotides, polypeptides, agonists, and/or antagonists of the present invention include brain diseases, such as metabolic brain diseases which includes phenylketonuria such as maternal phenylketonuria, pyruvate carboxylase deficiency, pyruvate dehydrogenase complex deficiency, Wernicke's Encephalopathy, brain edema, brain neoplasms such as cerebellar neoplasms which include infratentorial neoplasms, cerebral ventricle neoplasms such as choroid plexus neoplasms, hypothalamic neoplasms, supratentorial neoplasms, canavan disease, cerebellar diseases such as cerebellar ataxia which include spinocerebellar degeneration such as ataxia telangiectasia, cerebellar dyssynergia, Friederich's Ataxia, Machado-Joseph Disease, olivopontocerebellar atrophy, cerebellar neoplasms such as infratentorial neoplasms, diffuse cerebral sclerosis such as encephalitis periaxialis, globoid cell leukodystrophy, metachromatic leukodystrophy and subacute sclerosing panencephalitis.

[0690] Additional neurologic diseases which can be treated or detected with polynucleotides, polypeptides, agonists, and/or antagonists of the present invention include cerebrovascular disorders (such as carotid artery diseases which include carotid artery thrombosis, carotid stenosis and Moyamoya- Disease), cerebral amyloid angiopathy, cerebral aneurysm, cerebral anoxia, cerebral arteriosclerosis, cerebral arteriovenous malformations, cerebral artery diseases, cerebral embolism and thrombosis such as carotid artery thrombosis, sinus thrombosis and Wallenberg's Syndrome, cerebral hemorrhage such as epidural hematoma, subdural hematoma and subarachnoid hemorrhage, cerebral infarction, cerebral ischemia such as transient cerebral ischemia, Subclavian Steal Syndrome and vertebrobasilar insufficiency, vascular dementia such as multi-infarct dementia, periventricular leukomalacia, vascular headache such as cluster headache and migraine.

[0691] Additional neurologic diseases which can be treated or detected with polynucleotides, polypeptides, agonists, and/or antagonists of the present invention include dementia such as AIDS Dementia Complex, presenile dementia such as Alzheimer's Disease and Creutzfeldt-Jakob Syndrome, senile dementia such as Alzheimer's Disease and progressive supranuclear palsy, vascular dementia such as multi-infarct dementia, encephalitis which include encephalitis periaxialis, viral encephalitis such as epidemic encephalitis, Japanese Encephalitis, St. Louis Encephalitis, tick-borne encephalitis and West Nile Fever, acute 'disseminated encephalomyelitis, meningoencephalitis such as uveomeningoencephalitic syndrome, Postencephalitic Parkinson Disease and subacute sclerosing panencephalitis, encephalomalacia such as periventricular leukomalacia, epilepsy such as generalized epilepsy which includes infantile spasms, absence epilepsy, myoclonic epilepsy which includes MERRF Syndrome, tonic-clonic epilepsy, partial epilepsy such as complex partial epilepsy, frontal lobe epilepsy and temporal lobe epilepsy, post-traumatic epilepsy, status epilepticus such as Epilepsia Partialis Continua, and Hallervorden-Spatz Syndrome.

[0692] Additional neurologic diseases which can be treated or detected with polynucleotides, polypeptides, agonists, and/or antagonists of the present invention include hydrocephalus such as Dandy-Walker Syndrome and normal pressure hydrocephalus, hypothalamic diseases such as hypothalamic neoplasms, cerebral malaria, narcolepsy which includes cataplexy, bulbar poliomyelitis, cerebri pseudotumor, Rett Syndrome, Reye's Syndrome, thalamic diseases, cerebral toxoplasmosis, intracranial tuberculoma and Zellweger Syndrome, central nervous system infections such as AIDS Dementia Complex, Brain Abscess, subdural empyema, encephalomyelitis such as Equine Encephalomyelitis, Venezuelan Equine Encephalomyelitis, Necrotizing Hemorrhagic Encephalomyelitis, Visna, and cerebral malaria.

[0693] Additional neurologic diseases which can be treated or detected with polynucleotides, polypeptides, agonists, and/or antagonists of the present invention include meningitis such as arachnoiditis, aseptic meningtitis such as viral meningtitis which includes lymphocytic choriomeningitis, Bacterial meningtitis which includes Haemophilus Meningtitis, Listeria Meningtitis, Meningococcal Meningtitis such as Waterhouse-Friderichsen Syndrome, Pneumococcal Meningtitis and meningeal tuberculosis, fungal meningitis such as Cryptococcal Meningtitis, subdural effusion, meningoencephalitis such as uvemeningoencephalitic syndrome, myelitis such as transverse myelitis, neurosyphilis such as tabes dorsalis, poliomyelitis which includes bulbar poliomyelitis and postpoliomyelitis syndrome, prion diseases (such as Creutzfeldt-Jakob Syndrome, Bovine Spongiform Encephalopathy, Gerstmann-Straussler Syndrome, Kuru, Scrapie), and cerebral toxoplasmosis.

[0694] Additional neurologic diseases which can be treated or detected with polynucleotides, polypeptides, agonists, and/or antagonists of the present invention include central nervous system neoplasms such as brain neoplasms that include cerebellar neoplasms such as infratentorial neoplasms, cerebral ventricle neoplasms such as choroid plexus neoplasms, hypothalamic neoplasms and supratentorial neoplasms, meningeal neoplasms, spinal cord neoplasms which include epidural neoplasms, demyelinating diseases such as Canavan Diseases, diffuse cerebral sceloris which includes adrenoleukodystrophy, encephalitis periaxialis, globoid cell leukodystrophy, diffuse cerebral sclerosis such as metachromatic leukodystrophy, allergic encephalomyelitis, necrotizing hemorrhagic enc ephalomyelitis, progressive multifocal leukoencephalopathy, multiple sclerosis, central pontine myelinolysis, transverse myelitis, neuromyelitis optica, Scrapie, Swayback, Chronic Fatigue Syndrome, Visna, High Pressure Nervous Syndrome, Meningism, spinal cord diseases such as amyotonia congenita, amyotrophic lateral sclerosis, spinal muscular atrophy such as Werdnig-Hoffmann Disease, spinal cord compression, spinal cord neoplasms such as epidural neoplasms, syringomyelia, Tabes Dorsalis, Stiff-Man Syndrome, mental retardation such as Angelman Syndrome, Cri-du-Chat Syndrome, De Lange's Syndrome, Down Syndrome, Gangliosidoses such as gangliosidoses G(M1), Sandhoff Disease, Tay-Sachs Disease, Hartnup Disease, homocystinuria, Laurence-Moon-Biedl Syndrome, Lesch-Nyhan Syndrome, Maple Syrup Urine Disease, mucolipidosis such as fucosidosis, neuronal ceroid-lipofuscinosis, oculocerebrorenal syndrome, phenylketonuria such as maternal phenylketonuria, Prader-Willi Syndrome, Rett Syndrome, Rubinstein-Taybi Syndrome, Tuberous Sclerosis, WAGR Syndrome, nervous system abnormalities such as holoprosencephaly, neural tube defects such as anencephaly which includes hydrangencephaly, Arnold-Chairi Deformity, encephalocele, meningocele, meningomyelocele, spinal dysraphism such as spina bifida cystica and spina bifida occulta.

[0695] Additional neurologic diseases which can be treated or detected with polynucleotides, polypeptides, agonists, and/or antagonists of the present invention include hereditary motor and sensory neuropathies which include Charcot-Marie Disease, Hereditary optic atrophy, Refsum's Disease, hereditary spastic paraplegia, Werdnig-Hoffmann Disease, Hereditary Sensory and Autonomic Neuropathies such as Congenital Analgesia and Familial Dysautonomia, Neurologic manifestations (such as agnosia that include Gerstmann's Syndrome, Amnesia such as retrograde amnesia, apraxia, neurogenic bladder, cataplexy, communicative disorders such as hearing disorders that includes deafness, partial hearing loss, loudness recruitment and tinnitus, language disorders such as aphasia which include agraphia, anomia, broca aphasia, and Wernicke Aphasia, Dyslexia such as Acquired Dyslexia, language development disorders, speech disorders such as aphasia which includes anomia, broca aphasia and Wernicke Aphasia, articulation disorders, communicative disorders such as speech disorders which include dysarthria, echolalia, mutism and stuttering, voice disorders such as aphonia and hoarseness, decerebrate state, delirium, fasciculation, hallucinations, meningism, movement disorders such as angelman syndrome, ataxia, athetosis, chorea, dystonia, hypokinesia, muscle hypotonia, myoclonus, tic, torticollis and tremor, muscle hypertonia such as muscle rigidity such as stiff-man syndrome, muscle spasticity, paralysis such as facial paralysis which includes Herpes Zoster Oticus, Gastroparesis, Hemiplegia, ophthalmoplegia such as diplopia, Duane's Syndrome, Horner's Syndrome, Chronic progressive external ophthalmoplegia such as Kearns Syndrome, Bulbar Paralysis, Tropical Spastic Paraparesis, Paraplegia such as Brown-Sequard Syndrome, quadriplegia, respiratory paralysis and vocal cord paralysis, paresis, phantom limb, taste disorders such as ageusia and dysgeusia, vision disorders such as amblyopia, blindness, color vision defects, diplopia, hemianopsia, scotoma and subnormal vision, sleep disorders such as hypersomnia which includes Kleine-Levin Syndrome, insomnia, and somnambulism, spasm such as trismus, unconsciousness such as coma, persistent vegetative state and syncope and vertigo, neuromuscular diseases such as amyotonia congenita, amyotrophic lateral sclerosis, Lambert-Eaton Myasthenic Syndrome, motor neuron disease, muscular atrophy such as spinal muscular atrophy, Charcot-Marie Disease and Werdnig-Hoffmann Disease, Postpoliomyelitis Syndrome, Muscular Dystrophy, Myasthenia Gravis, Myotonia Atrophica, Myotonia Confenita, Nemaline Myopathy, Familial Periodic Paralysis, Multiplex Paramyloclonus, Tropical Spastic Paraparesis and Stiff-Man Syndrome, peripheral nervous system diseases such as acrodynia, amyloid neuropathies, autonomic nervous system diseases such as Adie's Syndrome, Barre-Lieou Syndrome, Familial Dysautonomia, Homer's Syndrome, Reflex Sympathetic Dystrophy and Shy-Drager Syndrome, Cranial Nerve Diseases such as Acoustic Nerve Diseases such as Acoustic Neuroma which includes Neurofibromatosis 2, Facial Nerve Diseases such as Facial Neuralgia,Melkersson-Rosenthal Syndrome, ocular motility disorders which includes amblyopia, nystagmus, oculomotor nerve paralysis, ophthalmoplegia such as Duane's Syndrome, Homer's Syndrome, Chronic Progressive External Ophthalmoplegia which includes Kearns Syndrome, Strabismus such as Esotropia and Exotropia, Oculomotor Nerve Paralysis, Optic Nerve Diseases such as Optic Atrophy which includes Hereditary Optic Atrophy, Optic Disk Drusen, Optic Neuritis such as Neuromyelitis Optica, Papilledema, Trigeminal Neuralgia, Vocal Cord Paralysis, Demyelinating Diseases such as Neuromyelitis Optica and Swayback, and Diabetic neuropathies such as diabetic foot.

[0696] Additional neurologic diseases which can be treated or detected with polynucleotides, polypeptides, agonists, and/or antagonists of the present invention include nerve compression syndromes such as carpal tunnel syndrome, tarsal tunnel syndrome, thoracic outlet syndrome such as cervical rib syndrome, ulnar nerve compression syndrome, neuralgia such as causalgia, cervico-brachial neuralgia, facial neuralgia and trigeminal neuralgia, neuritis such as experimental allergic neuritis, optic neuritis, polyneuritis, polyradiculoneuritis and radiculities such as polyradiculitis, hereditary motor and sensory neuropathies such as Charcot-Marie Disease, Hereditary Optic Atrophy, Refsum's Disease, Hereditary Spastic Paraplegia and Werdnig-Hoffmann Disease, Hereditary Sensory and Autonomic Neuropathies which include Congenital Analgesia and Familial Dysautonomia, POEMS Syndrome, Sciatica, Gustatory Sweating and Tetany).

[0697] Endocrine Disorders

[0698] Polynucleotides or polypeptides, or agonists or antagonists of the present invention, may be used to treat, prevent, diagnose, and/or prognose disorders and/or diseases related to hormone imbalance, and/or disorders or diseases of the endocrine system.

[0699] Hormones secreted by the glands of the endocrine system control physical growth, sexual function, metabolism, and other functions. Disorders may be classified in two ways: disturbances in the production of hormones, and the inability of tissues to respond to hormones. The etiology of these hormone imbalance or endocrine system diseases, disorders or conditions may be genetic, somatic, such as cancer and some autoimmune diseases, acquired (e.g., by chemotherapy, injury or toxins), or infectious. Moreover, polynucleotides, polypeptides, antibodies, and/or agonists or antagonists of the present invention can be used as a marker or detector of a particular disease or disorder related to the endocrine system and/or hormone imbalance.

[0700] Endocrine system and/or hormone imbalance and/or diseases encompass disorders of uterine motility including, but not limited to: complications with pregnancy and labor (e.g., pre-term labor, post-term pregnancy, spontaneous abortion, and slow or stopped labor); and disorders and/or diseases of the menstrual cycle (e.g., dysmenorrhea and endometriosis).

[0701] Endocrine system and/or hormone imbalance disorders and/or diseases include disorders and/or diseases of the pancreas, such as, for example, diabetes mellitus, diabetes insipidus, congenital pancreatic agenesis, pheochromocytoma—islet cell tumor syndrome; disorders and/or diseases of the adrenal glands such as, for example, Addison's Disease, corticosteroid deficiency, virilizing disease, hirsutism, Cushing's Syndrome, hyperaldosteronism, pheochromocytoma; disorders and/or diseases of the pituitary gland, such as, for example, hyperpituitarism, hypopituitarism, pituitary dwarfism, pituitary adenoma, panhypopituitarism, acromegaly, gigantism; disorders and/or diseases of the thyroid, including but not limited to, hyperthyroidism, hypothyroidism, Plummer's disease, Graves' disease (toxic diffuse goiter), toxic nodular goiter, thyroiditis (Hashimoto's thyroiditis, subacute granulomatous thyroiditis, and silent lymphocytic thyroiditis), Pendred's syndrome, myxedema, cretinism, thyrotoxicosis, thyroid hormone coupling defect, thymic aplasia, Hurthle cell tumours of the thyroid, thyroid cancer, thyroid carcinoma, Medullary thyroid carcinoma; disorders and/or diseases of the parathyroid, such as, for example, hyperparathyroidism, hypoparathyroidism; disorders and/or diseases of the hypothalamus.

[0702] In addition, endocrine system and/or hormone imbalance disorders and/or diseases may also include disorders and/or diseases of the testes or ovaries, including cancer. Other disorders and/or diseases of the testes or ovaries further include, for example, ovarian cancer, polycystic ovary syndrome, Klinefelter's syndrome, vanishing testes syndrome (bilateral anorchia), congenital absence of Leydig's cells, cryptorchidism, Noonan's syndrome, myotonic dystrophy, capillary haemangioma of the testis (benign), neoplasias of the testis and neo-testis.

[0703] Moreover, endocrine system and/or hormone imbalance disorders and/or diseases may also include disorders and/or diseases such as, for example, polyglandular deficiency syndromes, pheochromocytoma, neuroblastoma, multiple Endocrine neoplasia, and disorders and/or cancers of endocrine tissues.

[0704] In another embodiment, a polypeptide of the invention, or polynucleotides, antibodies, agonists, or antagonists corresponding to that polypeptide, may be used to diagnose, prognose, prevent, and/or treat endocrine diseases and/or disorders associated with the tissue(s) in which the polypeptide of the invention is expressed, including one, two, three, four, five, or more tissues disclosed in Table 1A, column 8 (Tissue Distribution Library Code).

[0705] Reproductive System Disorders

[0706] The polynucleotides or polypeptides, or agonists or antagonists of the invention may be used for the diagnosis, treatment, or prevention of diseases and/or disorders of the reproductive system. Reproductive system disorders that can be treated by the compositions of the invention, include, but are not limited to, reproductive system injuries, infections, neoplastic disorders, congenital defects, and diseases or disorders which result in infertility, complications with pregnancy, labor, or parturition, and postpartum difficulties.

[0707] Reproductive system disorders and/or diseases include diseases and/or disorders of the testes, including testicular atrophy, testicular feminization, cryptorchism (unilateral and bilateral), anorchia, ectopic testis, epididymitis and orchitis (typically resulting from infections such as, for example, gonorrhea, mumps, tuberculosis, and syphilis), testicular torsion, vasitis nodosa, germ cell tumors (e.g., seminomas, embryonal cell carcinomas, teratocarcinomas, choriocarcinomas, yolk sac tumors, and teratomas), stromal tumors (e.g., Leydig cell tumors), hydrocele, hematocele, varicocele, spermatocele, inguinal hernia, and disorders of sperm production (e.g., immotile cilia syndrome, aspermia, asthenozoospermia, azoospermia, oligospermia, and teratozoospermia).

[0708] Reproductive system disorders also include disorders of the prostate gland, such as acute non-bacterial prostatitis, chronic non-bacterial prostatitis, acute bacterial prostatitis, chronic bacterial prostatitis, prostatodystonia, prostatosis, granulomatous prostatitis, malacoplakia, benign prostatic hypertrophy or hyperplasia, and prostate neoplastic disorders, including adenocarcinomas, transitional cell carcinomas, ductal carcinomas, and squamous cell carcinomas.

[0709] Additionally, the compositions of the invention may be useful in the diagnosis, treatment, and/or prevention of disorders or diseases of the penis and urethra, including inflammatory disorders, such as balanoposthitis, balanitis xerotica obliterans, phimosis, paraphimosis, syphilis, herpes simplex virus, gonorrhea, non-gonococcal urethritis, chlamydia, mycoplasma, trichomonas, HIV, AIDS, Reiter's syndrome, condyloma acuminatum, condyloma latum, and pearly penile papules; urethral abnormalities, such as hypospadias, epispadias, and phimosis; premalignant lesions, including Erythroplasia of Queyrat, Bowen's disease, Bowenoid paplosis, giant condyloma of Buscke-Lowenstein, and varrucous carcinoma; penile cancers, including squamous cell carcinomas, carcinoma in situ, verrucous carcinoma, and disseminated penile carcinoma; urethral neoplastic disorders, including penile urethral carcinoma, bulbomembranous urethral carcinoma, and prostatic urethral carcinoma; and erectile disorders, such as priapism, Peyronie's disease, erectile dysfunction, and impotence.

[0710] Moreover, diseases and/or disorders of the vas deferens include vasculititis and CBAVD (congenital bilateral absence of the vas deferens); additionally, the polynucleotides, polypeptides, and agonists or antagonists of the present invention may be used in the diagnosis, treatment, and/or prevention of diseases and/or disorders of the seminal vesicles, including hydatid disease, congenital chloride diarrhea, and polycystic kidney disease.

[0711] Other disorders and/or diseases of the male reproductive system include, for example, Klinefelter's syndrome, Young's syndrome, premature ejaculation, diabetes mellitus, cystic fibrosis, Kartagener's syndrome, high fever, multiple sclerosis, and gynecomastia.

[0712] Further, the polynucleotides, polypeptides, and agonists or antagonists of the present invention may be used in the diagnosis, treatment, and/or prevention of diseases and/or disorders of the vagina and vulva, including bacterial vaginosis, candida vaginitis, herpes simplex virus, chancroid, granuloma inguinale, lymphogranuloma venereum, scabies, human papillomavirus, vaginal trauma, vulvar trauma, adenosis, chlamydia vaginitis, gonorrhea, trichomonas vaginitis, condyloma acuminatum, syphilis, molluscum contagiosum, atrophic vaginitis, Paget's disease, lichen sclerosus, lichen planus, vulvodynia, toxic shock syndrome, vaginismus, vulvovaginitis, vulvar vestibulitis, and neoplastic disorders, such as squamous cell hyperplasia, clear cell carcinoma, basal cell carcinoma, melanomas, cancer of Bartholin's gland, and vulvar intraepithelial neoplasia.

[0713] Disorders and/or diseases of the uterus include dysmenorrhea, retroverted uterus, endometriosis, fibroids, adenomyosis, anovulatory bleeding, amenorrhea, Cushing's syndrome, hydatidiform moles, Asherman's syndrome, premature menopause, precocious puberty, uterine polyps, dysfunctional uterine bleeding (e.g., due to aberrant hormonal signals), and neoplastic disorders, such as adenocarcinomas, keiomyosarcomas, and sarcomas. Additionally, the polypeptides, polynucleotides, or agonists or antagonists of the invention may be useful as a marker or detector of, as well as in the diagnosis, treatment, and/or prevention of congenital uterine abnormalities, such as bicornuate uterus, septate uterus, simple unicomuate uterus, unicomuate uterus with a noncavitary rudimentary horn, unicornuate uterus with a non-communicating cavitary rudimentary horn, unicornuate uterus with a communicating cavitary horn, arcuate uterus, uterine didelfus, and T-shaped uterus.

[0714] Ovarian diseases and/or disorders include anovulation, polycystic ovary syndrome (Stein-Leventhal syndrome), ovarian cysts, ovarian hypofunction, ovarian insensitivity to gonadotropins, ovarian overproduction of androgens, right ovarian vein syndrome, amenorrhea, hirutism, and ovarian cancer (including, but not limited to, primary and secondary cancerous growth, Sertoli-Leydig tumors, endometriod carcinoma of the ovary, ovarian papillary serous adenocarcinoma, ovarian mucinous adenocarcinoma, and Ovarian Krukenberg tumors).

[0715] Cervical diseases and/or disorders include cervicitis, chronic cervicitis, mucopurulent cervicitis, cervical dysplasia, cervical polyps, Nabothian cysts, cervical erosion, cervical incompetence, and cervical neoplasms (including, for example, cervical carcinoma, squamous metaplasia, squamous cell carcinoma, adenosquamous cell neoplasia, and columnar cell neoplasia).

[0716] Additionally, diseases and/or disorders of the reproductive system include disorders and/or diseases of pregnancy, including miscarriage and stillbirth, such as early abortion, late abortion, spontaneous abortion, induced abortion, therapeutic abortion, threatened abortion, missed abortion, incomplete abortion, complete abortion, habitual abortion, missed abortion, and septic abortion; ectopic pregnancy, anemia, Rh incompatibility, vaginal bleeding during pregnancy, gestational diabetes, intrauterine growth retardation, polyhydramnios, HELLP syndrome, abruptio placentae, placenta previa, hyperemesis, preeclampsia, eclampsia, herpes gestationis, and urticaria of pregnancy. Additionally, the polynucleotides, polypeptides, and agonists or antagonists of the present invention may be used in the diagnosis, treatment, and/or prevention of diseases that can complicate pregnancy, including heart disease, heart failure, rheumatic heart disease, congenital heart disease, mitral valve prolapse, high blood pressure, anemia, kidney disease, infectious disease (e.g., rubella, cytomegalovirus, toxoplasmosis, infectious hepatitis, chlamydia, HIV, AIDS, and genital herpes), diabetes mellitus, Graves' disease, thyroiditis, hypothyroidism, Hashimoto's thyroiditis, chronic active hepatitis, cirrhosis of the liver, primary biliary cirrhosis, asthma, systemic lupus eryematosis, rheumatoid arthritis, myasthenia gravis, idiopathic thrombocytopenic purpura, appendicitis, ovarian cysts, gallbladder disorders,and obstruction of the intestine.

[0717] Complications associated with labor and parturition include premature rupture of the membranes, pre-term labor, post-term pregnancy, postmaturity, labor that progresses too slowly, fetal distress (e.g., abnormal heart rate (fetal or maternal), breathing problems, and abnormal fetal position), shoulder dystocia, prolapsed umbilical cord, amniotic fluid embolism, and aberrant uterine bleeding.

[0718] Further, diseases and/or disorders of the postdelivery period, including endometritis, myometritis, parametritis, peritonitis, pelvic thrombophlebitis, pulmonary embolism, endotoxemia, pyelonephritis, saphenous thrombophlebitis, mastitis, cystitis, postpartum hemorrhage, and inverted uterus.

[0719] Other disorders and/or diseases of the female reproductive system that may be diagnosed, treated, and/or prevented by the polynucleotides, polypeptides, and agonists or antagonists of the present invention include, for example, Turner's syndrome, pseudohermaphroditism, premenstrual syndrome, pelvic inflammatory disease, pelvic congestion (vascular engorgement), frigidity, anorgasmia, dyspareunia, ruptured fallopian tube, and Mittelschmerz.

[0720] Infectious Disease

[0721] Polynucleotides or polypeptides, as well as agonists or antagonists of the present invention can be used to treat or detect infectious agents. For example, by increasing the immune response, particularly increasing the proliferation and differentiation of B and/or T cells, infectious diseases may be treated. The immune response may be increased by either enhancing an existing immune response, or by initiating a new immune response. Alternatively, polynucleotides or polypeptides, as well as agonists or antagonists of the present invention may also directly inhibit the infectious agent, without necessarily eliciting an immune response.

[0722] Viruses are one example of an infectious agent that can cause disease or symptoms that can be treated or detected by a polynucleotide or polypeptide and/or agonist or antagonist of the present invention. Examples of viruses, include, but are not limited to Examples of viruses, include, but are not limited to the following DNA and RNA viruses and viral families: Arbovirus, Adenoviridae, Arenaviridae, Arterivirus, Birnaviridae, Bunyaviridae, Caliciviridae, Circoviridae, Coronaviridae, Dengue, EBV, HIV, Flaviviridae, Hepadnaviridae (Hepatitis), Herpesviridae (such as, Cytomegalovirus, Herpes Simplex, Herpes Zoster), Mononegavirus (e.g., Paramyxoviridae, Morbillivirus, Rhabdoviridae), Orthomyxoviridae (e.g., Influenza A, Influenza B, and parainfluenza), Papiloma virus, Papovaviridae, Parvoviridae, Picornaviridae, Poxviridae (such as Smallpox or Vaccinia), Reoviridae (e.g., Rotavirus), Retroviridae (HTLV-I, HTLV-II, Lentivirus), and Togaviridae (e.g., Rubivirus). Viruses falling within these families can cause a variety of diseases or symptoms, including, but not limited to: arthritis, bronchiollitis, respiratory syncytial virus, encephalitis, eye infections (e.g., conjunctivitis, keratitis), chronic fatigue syndrome, hepatitis (A, B, C, E, Chronic Active, Delta), Japanese B encephalitis, Junin, Chikungunya, Rift Valley fever, yellow fever, meningitis, opportunistic infections (e.g., AIDS), pneumonia, Burkitt's Lymphoma, chickenpox, hemorrhagic fever, Measles, Mumps, Parainfluenza, Rabies, the common cold, Polio, leukemia, Rubella, sexually transmitted diseases, skin diseases (e.g., Kaposi's, warts), and viremia. polynucleotides or polypeptides, or agonists or antagonists of the invention, can be used to treat or detect any of these symptoms or diseases. In specific embodiments, polynucleotides, polypeptides, or agonists or antagonists of the invention are used to treat: meningitis, Dengue, EBV, and/or hepatitis (e.g., hepatitis B). In an additional specific embodiment polynucleotides, polypeptides, or agonists or antagonists of the invention are used to treat patients nonresponsive to one or more other commercially available hepatitis vaccines. In a further specific embodiment polynucleotides, polypeptides, or agonists or antagonists of the invention are used to treat AIDS.

[0723] Similarly, bacterial and fungal agents that can cause disease or symptoms and that can be treated or detected by a polynucteotide or polypeptide and/or agonist or antagonist of the present invention include, but not limited to, the following Gram-Negative and Gram-positive bacteria, bacterial families, and fungi: Actinomyces (e.g., Norcardia), Acinetobacter, Cryptococcus neoformans, Aspergillus, Bacillaceae (e.g., Bacillus anthrasis), Bacteroides (e.g., Bacteroides Fragilis), Blastomycosis, Bordetella, Borrelia (e.g., Borrelia burgdorferi), Brucella, Candidia, Campylobacter, Chlamydia, Clostridium (e.g., Clostridium botulinum, Clostridium dificile, Clostridium perfringens, Clostridium tetani), Coccidioides, Corynebacterium (e.g., Corynebacterium diptheriae), Cryptococcus, Dermatocycoses, E. coli (e.g., Enterotoxigenic E. coli and Enterohemorrhagic E. coli), Enterobacter (e.g. Enterobacter aerogenes), Enterobacteriaceae (Klebsiella, Salmonella (e.g., Salmonella typhi, Salmonella enteritidis, Salmonella typhi), Serratia, Yersinia, Shigella), Erysipelothrix, Haemophilus (e.g., Haemophilus influenza type B), Helicobacter, Legionella (e.g., Legionella pneumophila), Leptospira, Listeria (e.g., Listeria Monocytogenes), Mycoplasma, Mycobacterium (e.g., Mycobacterium leprae and Mycobacterium tuberculosis), Vibrio (e.g., Vibrio cholerae), Neisseriaceae (e.g., Neisseria gonorrhea, Neisseria meningitidis), Pasteurellacea, Proteus, Pseudomonas (e.g., Pseudomonas aeruginosa), Rickettsiaceae, Spirochetes (e.g., Treponema spp., Leptospira spp., Borrelia spp.), Shigella spp., Staphylococcus (e.g., Staphylococcus aureus), Meningiococcus, Pneumococcus and Streptococcus (e.g., Streptococcus pneumoniae and Groups A, B, and C Streptococci), and Ureaplasmas. These bacterial, parasitic, and fungal families can cause diseases or symptoms, including, but not limited to: antibiotic-resistant infections, bacteremia, endocarditis, septicemia, eye infections (e.g., conjunctivitis), uveitis, tuberculosis, gingivitis, bacterial diarrhea, opportunistic infections (e.g., AIDS related infections), paronychia, prosthesis-related infections, dental caries, Reiter's Disease, respiratory tract infections, such as Whooping Cough or Empyema, sepsis, Lyme Disease, Cat-Scratch Disease, dysentery, paratyphoid fever, food poisoning, Legionella disease, chronic and acute inflammation, erythema, yeast infections, typhoid, pneumonia, gonorrhea, meningitis (e.g., mengitis types A and B), chlamydia, syphillis, diphtheria, leprosy, brucellosis, peptic ulcers, anthrax, spontaneous abortions, birth defects, pneumonia, lung infections, ear infections, deafness, blindness, lethargy, malaise, vomiting, chronic diarrhea, Crohn's disease, colitis, vaginosis, sterility, pelvic inflammatory diseases, candidiasis, paratuberculosis, tuberculosis, lupus, botulism, gangrene, tetanus, impetigo, Rheumatic Fever, Scarlet Fever, sexually transmitted diseases, skin diseases (e.g., cellulitis, dermatocycoses), toxemia, urinary tract infections, wound infections, noscomial infections. Polynucleotides or polypeptides, agonists or antagonists of the invention, can be used to treat or detect any of these symptoms or diseases. In specific embodiments, polynucleotides, polypeptides, agonists or antagonists of the invention are used to treat: tetanus, diptheria, botulism, and/or meningitis type B.

[0724] Moreover, parasitic agents causing disease or symptoms that can be treated, prevented, and/or diagnosed by a polynucleotide or polypeptide and/or agonist or antagonist of the present invention include, but not limited to, the following families or class: Amebiasis, Babesiosis, Coccidiosis, Cryptosporidiosis, Dientamoebiasis, Dourine, Ectoparasitic, Giardias, Helminthiasis, Leishmaniasis, Schistisorna, Theileriasis, Toxoplasmosis, Trypanosomiasis, and Trichomonas and Sporozoans (e.g., Plasmodium virax, Plasmodium falciparium, Plasmodium malariae and Plasmodium ovale). These parasites can cause a variety of diseases or symptoms, including, but not limited to: Scabies, Trombiculiasis, eye infections, intestinal disease (e.g., dysentery, giardiasis), liver disease, lung disease, opportunistic infections (e.g., AIDS related), malaria, pregnancy complications, and toxoplasmosis. polynucleotides or polypeptides, or agonists or antagonists of the invention, can be used to treat, prevent, and/or diagnose any of these symptoms or diseases. In specific embodiments, polynucleotides, polypeptides, or agonists or antagonists of the invention are used to treat, prevent, and/or diagnose malaria.

[0725] Polynucleotides or polypeptides, as well as agonists or antagonists of the present invention of the present invention could either be by administering an effective amount of a polypeptide to the patient, or by removing cells from the patient, supplying the cells with a polynucleotide of the present invention, and returning the engineered cells to the patient (ex vivo therapy). Moreover, the polypeptide or polynucleotide of the present invention can be used as an antigen in a vaccine to raise an immune response against infectious disease.

[0726] Regeneration

[0727] Polynucleotides or polypeptides, as well as agonists or antagonists of the present invention can be used to differentiate, proliferate, and attract cells, leading to the regeneration of tissues. (See, Science 276:59-87 (1997)). The regeneration of tissues could be used to repair, replace, or protect tissue damaged by congenital defects, trauma (wounds, bums, incisions, or ulcers), age, disease (e.g. osteoporosis, osteocarthritis, periodontal disease, liver failure), surgery, including cosmetic plastic surgery, fibrosis, reperfusion injury, or systemic cytokine damage.

[0728] Tissues that could be regenerated using the present invention include organs (e.g., pancreas, liver, intestine, kidney, skin, endothelium), muscle (smooth, skeletal or cardiac), vasculature (including vascular and lymphatics), nervous, hematopoietic, and skeletal (bone, cartilage, tendon, and ligament) tissue. Preferably, regeneration occurs without or decreased scarring. Regeneration also may include angiogenesis.

[0729] Moreover, polynucleotides or polypeptides, as well as agonists or antagonists of the present invention, may increase regeneration of tissues difficult to heal. For example, increased tendon/ligament regeneration would quicken recovery time after damage. Polynucleotides or polypeptides, as well as agonists or antagonists of the present invention could also be used prophylactically in an effort to avoid damage. Specific diseases that could be treated include of tendinitis, carpal tunnel syndrome, and other tendon or ligament defects. A further example of tissue regeneration of non-healing wounds includes pressure ulcers, ulcers associated with vascular insufficiency, surgical, and traumatic wounds.

[0730] Similarly, nerve and brain tissue could also be regenerated by using polynucleotides or polypeptides, as well as agonists or antagonists of the present invention, to proliferate and differentiate nerve cells. Diseases that could be treated using this method include central and peripheral nervous system diseases, neuropathies, or mechanical and traumatic disorders (e.g., spinal cord disorders, head trauma, cerebrovascular disease, and stoke). Specifically, diseases associated with peripheral nerve injuries, peripheral neuropathy (e.g., resulting from chemotherapy or other medical therapies), localized neuropathies, and central nervous system diseases (e.g., Alzheimer's disease, Parkinson's disease, Huntington's disease, amyotrophic lateral sclerosis, and Shy-Drager syndrome), could all be treated using the polynucleotides or polypeptides, as well as agonists or antagonists of the present invention.

[0731] Gastrointestinal Disorders

[0732] Polynucleotides or polypeptides, or agonists or antagonists of the present invention, may be used to treat, prevent, diagnose, and/or prognose gastrointestinal disorders, including inflammatory diseases and/or conditions, infections, cancers (e.g., intestinal neoplasms (carcinoid tumor of the small intestine, non-Hodgkin's lymphoma of the small intestine, small bowl lymphoma)), and ulcers, such as peptic ulcers.

[0733] Gastrointestinal disorders include dysphagia, odynophagia, inflammation of the esophagus, peptic esophagitis, gastric reflux, submucosal fibrosis and stricturing, Mallory-Weiss lesions, leiomyomas, lipomas, epidermal cancers, adeoncarcinomas, gastric retention disorders, gastroenteritis, gastric atrophy, gastric/stomach cancers, polyps of the stomach, autoimmune disorders such as pernicious anemia, pyloric stenosis, gastritis (bacterial, viral, eosinophilic, stress-induced, chronic erosive, atrophic, plasma cell, and Menetrier's), and peritoneal diseases (e.g., chyloperioneum, hemoperitoneum, mesenteric cyst, mesenteric lymphadenitis, mesenteric vascular occlusion, panniculitis, neoplasms, peritonitis, pneumoperitoneum, bubphrenic abscess,).

[0734] Gastrointestinal disorders also include disorders associated with the small intestine, such as malabsorption syndromes, distension, irritable bowel syndrome, sugar intolerance, celiac disease, duodenal ulcers, duodenitis, tropical sprue, Whipple's disease, intestinal lymphangiectasia, Crohn's disease, appendicitis, obstructions of the ileum, Meckel's diverticulum, multiple diverticula, failure of complete rotation of the small and large intestine, lymphoma, and bacterial and parasitic diseases (such as Traveler's diarrhea, typhoid and paratyphoid, cholera, infection by Roundworms (Ascariasis lumbricoides), Hookworms (Ancylostoma duodenale), Threadworms (Enterobius vermicularis), Tapeworms (Taenia saginata, Echinococcus granulosus, Diphyllobothrium spp., and T. Solium).

[0735] Liver diseases and/or disorders include intrahepatic cholestasis (alagille syndrome, biliary liver cirrhosis), fatty liver (alcoholic fatty liver, reye syndrome), hepatic vein thrombosis, hepatolentricular degeneration, hepatomegaly, hepatopulmonary syndrome, hepatorenal syndrome, portal hypertension (esophageal and gastric varices), liver abscess (amebic liver abscess), liver cirrhosis (alcoholic, biliary and experimental), alcoholic liver diseases (fatty liver, hepatitis, cirrhosis), parasitic (hepatic echinococcosis, fascioliasis, amebic liver abscess), jaundice (hemolytic, hepatocellular, and cholestatic), cholestasis, portal hypertension, liver enlargement, ascites, hepatitis (alcoholic hepatitis, animal hepatitis, chronic hepatitis (autoimmune, hepatitis B, hepatitis C, hepatitis D, drug induced), toxic hepatitis, viral human hepatitis (hepatitis A, hepatitis B, hepatitis C, hepatitis D, hepatitis E), Wilson's disease, granulomatous hepatitis, secondary biliary cirrhosis, hepatic encephalopathy, portal hypertension, varices, hepatic encephalopathy, primary biliary cirrhosis, primary sclerosing cholangitis, hepatocellular adenoma, hemangiomas, bile stones, liver failure (hepatic encephalopathy, acute liver failure), and liver neoplasms (angiomyolipoma, calcified liver metastases, cystic liver metastases, epithelial tumors, fibrolamellar hepatocarcinoma, focal nodular hyperplasia, hepatic adenoma, hepatobiliary cystadenoma, hepatoblastoma, hepatocellular carcinoma, hepatoma, liver cancer, liver hemangioendothelioma, mesenchymal hamartoma, mesenchymal tumors of liver, nodular regenerative hyperplasia, benign liver tumors (Hepatic cysts [Simple cysts, Polycystic liver disease, Hepatobiliary cystadenoma, Choledochal cyst], Mesenchymal tumors [Mesenchymal hamartoma, Infantile hemangioendothelioma, Hemangioma, Peliosis hepatis, Lipomas, Inflammatory pseudotumor, Miscellaneous], Epithelial tumors [Bile duct epithelium (Bile duct hamartoma, Bile duct adenoma), Hepatocyte (Adenoma, Focal nodular hyperplasia, Nodular regenerative hyperplasia)], malignant liver tumors [hepatocellular, hepatoblastoma, hepatocellular carcinoma, cholangiocellular, cholangiocarcinoma, cystadenocarcinoma, tumors of blood vessels, angiosarcoma, Karposi's sarcoma, hemangioendothelioma, other tumors, embryonal sarcoma, fibrosarcoma, leiomyosarcoma, rhabdomyosarcoma, carcinosarcoma, teratoma, carcinoid, squamous carcinoma, primary lymphoma]), peliosis hepatis, erythrohepatic porphyria, hepatic porphyria (acute intermittent porphyria, porphyria cutanea tarda), Zellweger syndrome).

[0736] Pancreatic diseases and/or disorders include acute pancreatitis, chronic pancreatitis (acute necrotizing pancreatitis, alcoholic pancreatitis), neoplasms (adenocarcinoma of the pancreas, cystadenocarcinoma, insulinoma, gastrinoma, and glucagonoma, cystic neoplasms, islet-cell tumors, pancreoblastoma), and other pancreatic diseases (e.g., cystic fibrosis, cyst (pancreatic pseudocyst, pancreatic fistula, insufficiency)).

[0737] Gallbladder diseases include gallstones (cholelithiasis and choledocholithiasis), postcholecystectomy syndrome, diverticulosis of the gallbladder, acute cholecystitis, chronic cholecystitis, bile duct tumors, and mucocele.

[0738] Diseases and/or disorders of the large intestine include antibiotic-associated colitis, diverticulitis, ulcerative colitis, acquired megacolon, abscesses, fungal and bacterial infections, anorectal disorders (e.g., fissures, hemorrhoids), colonic diseases (colitis, colonic neoplasms [colon cancer, adenomatous colon polyps (e.g., villous adenoma), colon carcinoma, colorectal cancer], colonic diverticulitis, colonic diverticulosis, megacolon [Hirschsprung disease, toxic megacolon]; sigmoid diseases [proctocolitis, sigmoin neoplasms]), constipation, Crohn's disease, diarrhea (infantile diarrhea, dysentery), duodenal diseases (duodenal neoplasms, duodenal obstruction, duodenal ulcer, duodenitis), enteritis (enterocolitis), HIV enteropathy, ileal diseases (ileal neoplasms, ileitis), immunoproliferative small intestinal disease, inflammatory bowel disease (ulcerative colitis, Crohn's disease), intestinal atresia, parasitic diseases (anisakiasis, balantidiasis, blastocystis infections, cryptosporidiosis, dientamoebiasis, amebic dysentery, giardiasis), intestinal fistula (rectal fistula), intestinal neoplasms (cecal neoplasms, colonic neoplasms, duodenal neoplasms, ileal neoplasms, intestinal polyps, jejunal neoplasms, rectal neoplasms), intestinal obstruction (afferent loop syndrome, duodenal obstruction, impacted feces, intestinal pseudo-obstruction [cecal volvulus], intussusception), intestinal perforation, intestinal polyps (colonic polyps, gardner syndrome, peutz-jeghers syndrome), jejunal diseases (jejunal neoplasms), malabsorption syndromes (blind loop syndrome, celiac disease, lactose intolerance, short bowl syndrome, tropical sprue, whipple's disease), mesenteric vascular occlusion, pneumatosis cystoides intestinalis, protein-losing enteropathies (intestinal lymphagiectasis), rectal diseases (anus diseases, fecal incontinence, hemorrhoids, proctitis, rectal fistula, rectal prolapse, rectocele), peptic ulcer (duodenal ulcer, peptic esophagitis, hemorrhage, perforation, stomach ulcer, Zollinger-Ellison syndrome), postgastrectomy syndromes (dumping syndrome), stomach diseases (e.g., achlorhydria, duodenogastric reflux (bile reflux), gastric antral vascular ectasia, gastric fistula, gastric outlet obstruction, gastritis (atrophic or hypertrophic), gastroparesis, stomach dilatation, stomach diverticulum, stomach neoplasms (gastric cancer, gastric polyps, gastric adenocarcinoma, hyperplastic gastric polyp), stomach rupture, stomach ulcer, stomach volvulus), tuberculosis, visceroptosis, vomiting (e.g., hematemesis, hyperemesis gravidarum, postoperative nausea and vomiting) and hemorrhagic colitis.

[0739] Further diseases and/or disorders of the gastrointestinal system include biliary tract diseases, such as, gastroschisis, fistula (e.g., biliary fistula, esophageal fistula, gastric fistula, intestinal fistula, pancreatic fistula), neoplasms (e.g., biliary tract neoplasms, esophageal neoplasms, such as adenocarcinoma of the esophagus, esophageal squamous cell carcinoma, gastrointestinal neoplasms, pancreatic neoplasms, such as adenocarcinoma of the pancreas, mucinous cystic neoplasm of the pancreas, pancreatic cystic neoplasms, pancreatoblastoma, and peritoneal neoplasms), esophageal disease (e.g., bullous diseases, candidiasis, glycogenic acanthosis, ulceration, barrett esophagus varices, atresia, cyst, diverticulum (e.g., Zenker's diverticulum), fistula (e.g., tracheoesophageal fistula), motility disorders (e.g., CREST syndrome, deglutition disorders, achalasia, spasm, gastroesophageal reflux), neoplasms, perforation (e.g., Boerhaave syndrome, Mallory-Weiss syndrome), stenosis, esophagitis, diaphragmatic hernia (e.g., hiatal hernia); gastrointestinal diseases, such as, gastroenteritis (e.g., cholera morbus, norwalk virus infection), hemorrhage (e.g., hematemesis, melena, peptic ulcer hemorrhage), stomach neoplasms (gastric cancer, gastric polyps, gastric adenocarcinoma, stomach cancer)), hernia (e.g., congenital diaphragmatic hernia, femoral hernia, inguinal hernia, obturator hernia, umbilical hernia, ventral hernia), and intestinal diseases (e.g., cecal diseases (appendicitis, cecal neoplasms)).

[0740] Chemotaxis

[0741] Polynucleotides or polypeptides, as well as agonists or antagonists of the present invention may have chemotaxis activity. A chemotaxic molecule attracts or mobilizes cells (e.g., monocytes, fibroblasts, neutrophils, T-cells, mast cells, eosinophils, epithelial and/or endothelial cells) to a particular site in the body, such as inflammation, infection, or site of hyperproliferation. The mobilized cells can then fight off and/or heal the particular trauma or abnormality.

[0742] Polynucleotides or polypeptides, as well as agonists or antagonists of the present invention may increase chemotaxic activity of particular cells. These chemotactic molecules can then be used to treat inflammation, infection, hyperproliferative disorders, or any immune system disorder by increasing the number of cells targeted to a particular location in the body. For example, chemotaxic molecules can be used to treat wounds and other trauma to tissues by attracting immune cells to the injured location. Chemotactic molecules of the present invention can also attract fibroblasts, which can be used to treat wounds.

[0743] It is also contemplated that polynucleotides or polypeptides, as well as agonists or antagonists of the present invention may inhibit chemotactic activity. These molecules could also be used to treat disorders. Thus, polynucleotides or polypeptides, as well as agonists or antagonists of the present invention could be used as an inhibitor of chemotaxis.

[0744] Binding Activity

[0745] A polyp eptide of the present invention may be used to screen for molecules that bind to the polyp eptide or for molecules to which the polypeptide binds. The binding of the polypeptide and the molecule may activate (agonist), increase, inhibit (antagonist), or decrease activity of the polypeptide or the molecule bound. Examples of such molecules include antibodies, oligonucleotides, proteins (e.g., receptors),or small molecules.

[0746] Preferably, the molecule is closely related to the natural ligand of the polypeptide, e.g., a fragment of the ligand, or a natural substrate, a ligand, a structural or functional mimetic. (See, Coligan et al., Current Protocols in Immunology 1 (2):Chapter 5 (1991)). Similarly, the molecule can be closely related to the natural receptor to which the polypeptide binds, or at least, a fragment of the receptor capable of being bound by the polypeptide (e.g., active site). In either case, the molecule can be rationally designed using known techniques.

[0747] Preferably, the screening for these molecules involves producing appropriate cells which express the polypeptide. Preferred cells include cells from mammals, yeast, Drosophila, or E. coli. Cells expressing the polypeptide (or cell membrane containing the expressed polypeptide) are then preferably contacted with a test compound potentially containing the molecule to observe binding, stimulation, or inhibition of activity of either the polypeptide or the molecule.

[0748] The assay may simply test binding of a candidate compound to the polypeptide, wherein binding is detected by a label, or in an assay involving competition with a labeled competitor. Further, the assay may test whether the candidate compound results in a signal generated by binding to the polypeptide.

[0749] Alternatively, the assay can be carried out using cell-free preparations, polypeptide/molecule affixed to a solid support, chemical libraries, or natural product mixtures. The assay may also simply comprise the steps of mixing a candidate compound with a solution containing a polypeptide, measuring polypeptide/molecule activity or binding, and comparing the polypeptide/molecule activity or binding to a standard.

[0750] Preferably, an ELISA assay can measure polypeptide level or activity in a sample (e.g., biological sample) using a monoclonal or polyclonal antibody. The antibody can measure polypeptide level or activity by either binding, directly or indirectly, to the polypeptide or by competing with the polypeptide for a substrate.

[0751] Additionally, the receptor to which the polypeptide of the present invention binds can be identified by numerous methods known to those of skill in the art, for example, ligand panning and FACS sorting (Coligan, et al., Current Protocols in Immun., 1(2), Chapter 5, (1991)). For example, expression cloning is employed wherein polyadenylated RNA is prepared from a cell responsive to the polypeptides, for example, NIH3T3 cells which are known to contain multiple receptors for the FGF family proteins, and SC-3 cells, and a cDNA library created from this RNA is divided into pools and used to transfect COS cells or other cells that are not responsive to the polypeptides. Transfected cells which are grown on glass slides are exposed to the polypeptide of the present invention, after they have been labeled. The polypeptides can be labeled by a variety of means including iodination or inclusion of a recognition site for a site-specific protein kinase.

[0752] Following fixation and incubation, the slides are subjected to auto-radiographic analysis. Positive pools are identified and sub-pools are prepared and re-transfected using an iterative sub-pooling and re-screening process, eventually yielding a single clones that encodes the putative receptor.

[0753] As an alternative approach for receptor identification, the labeled polypeptides can be photoaffinity linked with cell membrane or extract preparations that express the receptor molecule. Cross-linked material is resolved by PAGE analysis and exposed to X-ray film. The labeled complex containing the receptors of the polypeptides can be excised, resolved into peptide fragments, and subjected to protein microsequencing. The amino acid sequence obtained from microsequencing would be used to design a set of degenerate oligonucleotide probes to screen a eDNA library to identify the genes encoding the putative receptors.

[0754] Moreover, the techniques of gene-shuffling, motif-shuffling, exon-shuffling, and/or codon-shuffling (collectively referred to as “DNA shuffling”) may be employed to modulate the activities of the polypeptide of the present invention thereby effectively generating agonists and antagonists of the polypeptide of the present invention. See generally, U.S. Pat. Nos. 5,605,793, 5,811,238, 5,830,721, 5,834,252, and 5,837,458, and Patten, P. A., et al., Curr. Opinion Biotechnol. 8:724-33 (1997); Harayama, S. Trends Biotechnol. 16(2):76-82 (1998); Hansson, L. O., et al., J. Mol. Biol. 287:265-76 (1999); and Lorenzo, M. M. and Blasco, R. Biotechniques 24(2):308-13 (1998); each of these patents and publications are hereby incorporated by reference). In one embodiment, alteration of polynucleotides and corresponding polypeptides may be achieved by DNA shuffling. DNA shuffling involves the assembly of two or more DNA segments into a desired molecule by homologous, or site-specific, recombination. In another embodiment, polynucleotides and corresponding polypeptides may be altered by being subjected to random mutagenesis by error-prone PCR, random nucleotide insertion or other methods prior to recombination. In another embodiment, one or more components, motifs, sections, parts, domains, fragments, etc., of the polypeptide of the present invention may be recombined with one or more components, motifs, sections, parts, domains, fragments, etc. of one or more heterologous molecules. In preferred embodiments, the heterologous molecules are family members. In further preferred embodiments, the heterologous molecule is a growth factor such as, for example, platelet-derived growth factor (PDGF), insulin-like growth factor (IGF-I), transforming growth factor (TGF)-alpha, epidermal growth factor (EGF), fibroblast growth factor (FGF), TGF-beta, bone morphogenetic protein (BMP)-2, BMP-4, BMP-5, BMP-6, BMP-7, activins A and B, decapentaplegic(dpp), 60A, OP-2, dorsalin, growth differentiation factors (GDFs), nodal, MIS, inhibin-alpha, TGF-betal, TGF-beta2, TGF-beta3, TGF-beta5, and glial-derived neurotrophic factor (GDNF).

[0755] Other preferred fragments are biologically active fragments of the polypeptide of the present invention. Biologically active fragments are those exhibiting activity similar, but not necessarily identical, to an activity of the polypeptide of the present invention. The biological activity of the fragments may include an improved desired activity, or a decreased undesirable activity.

[0756] Additionally, this invention provides a method of screening compounds to identify those which modulate the action of the polypeptide of the present invention. An example of such an assay comprises combining a mammalian fibroblast cell, a the polypeptide of the present invention, the compound to be screened and ³[H] thymidine under cell culture conditions where the fibroblast cell would normally proliferate. A control assay may be performed in the absence of the compound to be screened and compared to the amount of fibroblast proliferation in the presence of the compound to determine if the compound stimulates proliferation by determining the uptake of ³[H] thymidine in each case. The amount of fibroblast cell proliferation is measured by liquid scintillation chromatography which measures the incorporation of ³[H] thymidine. Both agonist and antagonist compounds may be identified by this procedure.

[0757] In another method, a mammalian cell or membrane preparation expressing a receptor for a polypeptide of the present invention is incubated with a labeled polypeptide of the present invention in the presence of the compound. The ability of the compound to enhance or block this interaction could then be measured. Alternatively, the response of a known second messenger system following interaction of a compound to be screened and the receptor is measured and the ability of the compound to bind to the receptor and elicit a second messenger response is measured to determine if the compound is a potential agonist or antagonist. Such second messenger systems include but are not limited to, cAMP guanylate cyclase, ion channels or phosphoinositide hydrolysis.

[0758] All of these above assays can be used as diagnostic or prognostic markers. The molecules discovered using these assays can be used to treat disease or to bring about a particular result in a patient (e.g., blood vessel growth) by activating or inhibiting the polypeptide/molecule. Moreover, the assays can discover agents which may inhibit or enhance the production of the polypeptides of the invention from suitably manipulated cells or tissues.

[0759] Therefore, the invention includes a method of identifying compounds which bind to a polypeptide of the invention comprising the steps of: (a) incubating a candidate binding compound with a polypeptide of the present invention; and (b) determining if binding has occurred. Moreover, the invention includes a method of identifying agonists/antagonists comprising the steps of: (a) incubating a candidate compound with a polypeptide of the present invention, (b) assaying a biological activity, and (b) determining if a biological activity of the polypeptide has been altered.

[0760] Targeted Delivery

[0761] In another embodiment, the invention provides a method of delivering compositions to targeted cells expressing a receptor for a polypeptide of the invention, or cells expressing a cell bound form of a polypeptide of the invention.

[0762] As discussed herein, polypeptides or antibodies of the invention may be associated with heterologous polypeptides, heterologous nucleic acids, toxins, or prodrugs via hydrophobic, hydrophilic, ionic and/or covalent interactions. In one embodiment, the invention provides a method for the specific delivery of compositions of the invention to cells by administering polypeptides of the invention (including antibodies) that are associated with heterologous polypeptides or nucleic acids. In one example, the invention provides a method for delivering a therapeutic protein into the targeted cell. In another example, the invention provides a method for delivering a single stranded nucleic acid (e.g., antisense or ribozymes) or double stranded nucleic acid (e.g., DNA that can integrate into the cell's genome or replicate episomally and that can be transcribed) into the targeted cell.

[0763] In another embodiment, the invention provides a method for the specific destruction of cells (e.g., the destruction of tumor cells) by administering polypeptides of the invention (e.g., polypeptides of the invention or antibodies of the invention) in association with toxins or cytotoxic prodrugs.

[0764] By “toxin” is meant compounds that bind and activate endogenous cytotoxic effector systems, radioisotopes, holotoxins, modified toxins, catalytic subunits of toxins, or any molecules or enzymes not normally present in or on the surface of a cell that under defined conditions cause the cell's death. Toxins that may be used according to the methods of the invention include, but are not limited to, radioisotopes known in the art, compounds such as, for example, antibodies (or complement fixing containing portions thereof) that bind an inherent or induced endogenous cytotoxic effector system, thymidine kinase, endonuclease, RNAse, alpha toxin, ricin, abrin, Pseudomonas exotoxin A, diphtheria toxin, saporin, momordin, gelonin, pokeweed antiviral protein, alpha-sarcin and cholera toxin. By “cytotoxic prodrug” is meant a non-toxic compound that is converted by an enzyme, normally present in the cell, into a cytotoxic compound. Cytotoxic prodrugs that may be used according to the methods of the invention include, but are not limited to, glutamyl derivatives of benzoic acid mustard alkylating agent, phosphate derivatives of etoposide or mitomycin C, cytosine arabinoside, daunorubisin, and phenoxyacetamide derivatives of doxorubicin.

[0765] Drug Screening

[0766] Further contemplated is the use of the polypeptides of the present invention, or the polynucleotides encoding these polypeptides, to screen for molecules which modify the activities of the polypeptides of the present invention. Such a method would include contacting the polypeptide of the present invention with a selected compound(s) suspected of having antagonist or agonist activity, and assaying the activity of these polypeptides following binding.

[0767] This invention is particularly useful for screening therapeutic compounds by using the polypeptides of the present invention, or binding fragments thereof, in any of a variety of drug screening techniques. The polypeptide or fragment employed in such a test may be affixed to a solid support, expressed on a cell surface, free in solution, or located intracellularly. One method of drug screening utilizes eukaryotic or prokaryotic host cells which are stably transformed with recombinant nucleic acids expressing the polypeptide or fragment. Drugs are screened against such transformed cells in competitive binding assays. One may measure, for example, the formulation of complexes between the agent being tested and a polypeptide of the present invention.

[0768] Thus, the present invention provides methods of screening for drugs or any other agents which affect activities mediated by the polypeptides of the present invention. These methods comprise contacting such an agent with a polypeptide of the present invention or a fragment thereof and assaying for the presence of a complex between the agent and the polypeptide or a fragment thereof, by methods well known in the art. In such a competitive binding assay, the agents to screen are typically labeled. Following incubation, free agent is separated from that present in bound form, and the amount of free or uncomplexed label is a measure of the ability of a particular agent to bind to the polypeptides of the present invention.

[0769] Another technique for drug screening provides high throughput screening for compounds having suitable binding affinity to the polypeptides of the present invention, and is described in great detail in European Patent Application 84/03564, published on Sep. 13, 1984, which is incorporated herein by reference herein. Briefly stated, large numbers of different small peptide test compounds are synthesized on a solid substrate, such as plastic pins or some other surface. The peptide test compounds are reacted with polypeptides of the present invention and washed. Bound polypeptides are then detected by methods well known in the art. Purified polypeptides are coated directly onto plates for use in the aforementioned drug screening techniques. In addition, non-neutralizing antibodies may be used to capture the peptide and immobilize it on the solid support.

[0770] This invention also contemplates the use of competitive drug screening assays in which neutralizing antibodies capable of binding polypeptides of the present invention specifically compete with a test compound for binding to the polypeptides or fragments thereof. In this manner, the antibodies are used to detect the presence of any peptide which shares one or more antigenic epitopes with a polypeptide of the invention.

[0771] Antisense and Ribozyme (Antagonists)

[0772] In specific embodiments, antagonists according to the present invention are nucleic acids corresponding to the sequences contained in SEQ ID NO:X, or the complementary strand thereof, and/or to cDNA sequences contained in cDNA Clone ID NO:Z identified for example, in Table 1A. In one embodiment, antisense sequence is generated internally, by the organism, in another embodiment, the antisense sequence is separately administered (see, for example, O'Connor, J., Neurochem. 56:560 (1991). Oligodeoxynucleotides as Antisense Inhibitors of Gene Expression, CRC Press, Boca Raton, Fla. (1988). Antisense technology can be used to control gene expression through antisense DNA or RNA, or through triple-helix formation. Antisense techniques are discussed for example, in Okano, J., Neurochem. 56:560 (1991); Oligodeoxynucleotides as Antisense Inhibitors of Gene Expression, CRC Press, Boca Raton, FL (1988). Triple helix formation is discussed in, for instance, Lee et al., Nucleic Acids Research 6:3073 (1979); Cooney et al., Science 241:456 (1988); and Dervan et al., Science 251:1300 (1991). The methods are based on binding of a polynucleotide to a complementary DNA or RNA.

[0773] For example, the use of c-myc and c-myb antisense RNA constructs to inhibit the growth of the non-lymphocytic leukemia cell line HL-60 and other cell lines was previously described. (Wickstrom et al. (1988); Anfossi et al. (1989)). These experiments were performed in vitro by incubating cells with the oligoribonucleotide. A similar procedure for in vivo use is described in WO 91/15580. Briefly, a pair of oligonucleotides for a given antisense RNA is produced as follows: A sequence complimentary to the first 15 bases of the open reading frame is flanked by an EcoR1 site on the 5 end and a HindIll site on the 3 end. Next, the pair of oligonucleotides is heated at 90° C. for one minute and then annealed in 2× ligation buffer (20 mM TRIS HCl pH 7.5, 10 mM MgCl2, 10 MM dithiothreitol (DTT) and 0.2 mM ATP) and then ligated to the EcoR1/Hind III site of the retroviral vector PMV7 (WO 91/15580).

[0774] For example, the 5′ coding portion of a polynucleotide that encodes the polypeptide of the present invention may be used to design an antisense RNA oligonucleotide of from about 10 to 40 base pairs in length. A DNA oligonucleotide is designed to be complementary to a region of the gene involved in transcription thereby preventing transcription and the production of the receptor. The antisense RNA oligonucleotide hybridizes to the mRNA in vivo and blocks translation of the mRNA molecule into receptor polypeptide.

[0775] In one embodiment, the antisense nucleic acid of the invention is produced intracellularly by transcription from an exogenous sequence. For example, a vector or a portion thereof, is transcribed, producing an antisense nucleic acid (RNA) of the invention. Such a vector would contain a sequence encoding the antisense nucleic acid. Such a vector can remain episomal or become chromosomally integrated, as long as it can be transcribed to produce the desired antisense RNA. Such vectors can be constructed by recombinant DNA technology methods standard in the art. Vectors can be plasmid, viral, or others known in the art, used for replication and expression in vertebrate cells. Expression of the sequence encoding the polypeptide of the present invention or fragments thereof, can be by any promoter known in the art to act in vertebrate, preferably human cells. Such promoters can be inducible or constitutive. Such promoters include, but are not limited to, the SV40 early promoter region (Bemoist and Chambon, Nature 29:304-310 (1981), the promoter contained in the 3′ long terminal repeat of Rous sarcoma virus (Yamamoto et al., Cell 22:787-797 (1980), the herpes thymidine promoter (Wagner et al., Proc. Natl. Acad. Sci. U.S.A. 78:1441-1445 (1981), the regulatory sequences of the metallothionein gene (Brinster, et al., Nature 296:39-42 (1982)), etc.

[0776] The antisense nucleic acids of the invention comprise a sequence complementary to at least a portion of an RNA transcript of a gene of the present invention. However, absolute complementarity, although preferred, is not required. A sequence “complementary to at least a portion of an RNA,” referred to herein, means a sequence having sufficient complementarity to be able to hybridize with the RNA, forming a stable duplex; in the case of double stranded antisense nucleic acids, a single strand of the duplex DNA may thus be tested, or triplex formation may be assayed. The ability to hybridize will depend on both the degree of complementarity and the length of the antisense nucleic acid. Generally, the larger the hybridizing nucleic acid, the more base mismatches with a RNA it may contain and still form a stable duplex (or triplex as the case may be). One skilled in the art can ascertain a tolerable degree of mismatch by use of standard procedures to determine the melting point of the hybridized complex.

[0777] Oligonucleotides that are complementary to the 5′ end of the message, e.g., the 5′ untranslated sequence up to and including the AUG initiation codon, should work most efficiently at inhibiting translation. However, sequences complementary to the 3′ untranslated sequences of mRNAs have been shown to be effective at inhibiting translation of mRNAs as well. See generally, Wagner, R., 1994, Nature 372:333-335. Thus, oligonucleotides complementary to either the 5′- or 3′-non-translated, non-coding regions of polynucleotide sequences described herein could be used in an antisense approach to inhibit translation of endogenous mRNA. Oligonucleotides complementary to the 5′ untranslated region of the mRNA should include the complement of the AUG start codon. Antisense oligonucleotides complementary to mRNA coding regions are less efficient inhibitors of translation but could be used in accordance with the invention. Whether designed to hybridize to the 5′-, 3′- or coding region of mRNA of the present invention, antisense nucleic acids should be at least six nucleotides in length, and are preferably oligonucleotides ranging from 6 to about 50 nucleotides in length. In specific aspects the oligonucleotide is at least 10 nucleotides, at least 17 nucleotides, at least 25 nucleotides or at least 50 nucleotides.

[0778] The polynucleotides of the invention can be DNA or RNA or chimeric mixtures or derivatives or modified versions thereof, single-stranded or double-stranded. The oligonucleotide can be modified at the base moiety, sugar moiety, or phosphate backbone, for example, to improve stability of the molecule, hybridization, etc. The oligonucleotide may include other appended groups such as peptides (e.g., for targeting host cell receptors in vivo), or agents facilitating transport across the cell membrane (see, e.g., Letsinger et al., 1989, Proc. Natl. Acad. Sci. U.S.A. 86:6553-6556; Lemaitre et al., 1987, Proc. Natl. Acad. Sci. 84:648-652; PCT Publication No. WO88/09810, published Dec. 15, 1988) or the blood-brain barrier (see, e.g., PCT Publication No. WO89/10134, published Apr. 25, 1988), hybridization-triggered cleavage agents. (See, e.g., Krol et al., 1988, BioTechniques 6:958-976) or intercalating agents. (See, e.g., Zon, 1988, Pharm. Res. 5:539-549). To this end, the oligonucleotide may be conjugated to another molecule, e.g., a peptide, hybridization triggered cross-linking agent, transport agent, hybridization-triggered cleavage agent, etc.

[0779] The antisense oligonucleotide may comprise at least one modified base moiety which is selected from the group including, but not limited to, 5-fluorouracil, 5-bromouracil, 5-chlorouracil, 5-iodouracil, hypoxanthine, xantine, 4-acetylcytosine, 5-(carboxyhydroxylmethyl) uracil, 5-carboxymethylaminomethyl-2-thiouridine, 5-carboxymethylaminomethyluracil, dihydrouracil, beta-D-galactosylqueosine, inosine, N6-isopentenyladenine, 1-methylguanine, 1-methylinosine, 2,2-dimethylguanine, 2-methyladenine, 2-methylguanine, 3-methylcytosine, 5-methylcytosine, N6-adenine, 7-methylguanine, 5-methylaminomethyluracil, 5-methoxyaminomethyl-2-thiouracil, beta-D-mannosylqueosine, 5′-methoxycarboxymethyluracil, 5-methoxyuracil, 2-methylthio-N6-isopentenyladenine, uracil-5-oxyacetic acid (v), wybutoxosine, pseudouracil, queosine, 2-thiocytosine, 5-methyl-2-thiouracil, 2-thiouracil, 4-thiouracil, 5-methyluracil, uracil-5-oxyacetic acid methylester, uracil-5-oxyacetic acid (v), 5-methyl-2-thiouracil, 3-(3-amino-3-N-2-carboxypropyl) uracil, (acp3)w, and 2,6-diaminopurine.

[0780] The antisense oligonucleotide may also comprise at least one modified sugar moiety selected from the group including, but not limited to, arabinose, 2-fluoroarabinose, xylulose, and hexose.

[0781] In yet another embodiment, the antisense oligonucleotide comprises at least one modified phosphate backbone selected from the group including, but not limited to, a phosphorothioate, a phosphorodithioate, a phosphoramidothioate, a phosphoramidate, a phosphordiamidate, a methylphosphonate, an alkyl phosphotriester, and a formacetal or analog thereof.

[0782] In yet another embodiment, the antisense oligonucleotide is an a-anomeric oligonucleotide. An a-anomeric oligonucleotide forms specific double-stranded hybrids with complementary RNA in which, contrary to the usual b-units, the strands run parallel to each other (Gautier et al., 1987, Nucl. Acids Res. 15:6625-6641). The oligonucleotide is a 2′-0-methylribonucleotide (Inoue et al., 1987, Nucl. Acids Res. 15:6131-6148), or a chimeric RNA-DNA analogue (Inoue et al., 1987, FEBS Lett. 215:327-330).

[0783] Polynucleotides of the invention may be synthesized by standard methods known in the art, e.g. by use of an automated DNA synthesizer (such as are commercially available from Biosearch, Applied Biosystems, etc.). As examples, phosphorothioate oligonucleotides may be synthesized by the method of Stein et al. (1988, Nucl. Acids Res. 16:3209), methylphosphonate oligonucleotides can be prepared by use of controlled pore glass polymer supports (Sarin et al., 1988, Proc. Natl. Acad. Sci. U.S.A. 85:7448-7451), etc.

[0784] While antisense nucleotides complementary to the coding region sequence could be used, those complementary to the transcribed untranslated region are most preferred.

[0785] Potential antagonists according to the invention also include catalytic RNA, or a ribozyme (See, e.g., PCT International Publication WO 90/11364, published Oct. 4, 1990; Sarver et al, Science 247:1222-1225 (1990). While ribozymes that cleave mRNA at site specific recognition sequences can be used to destroy mRNAs, the use of hammerhead ribozymes is preferred. Hammerhead ribozymes cleave mRNAs at locations dictated by flanking regions that form complementary base pairs with the target mRNA. The sole requirement is that the target mRNA have the following sequence of two bases: 5′-UG-3′. The construction and production of hammerhead ribozymes is well known in the art and is described more fully in Haseloff and Gerlach, Nature 334:585-591 (1988). There are numerous potential hammerhead ribozyme cleavage sites within the nucleotide sequence of SEQ ID NO:X. Preferably, the ribozyme is engineered so that the cleavage recognition site is located near the 5′ end of the mRNA; i.e., to increase efficiency and minimize the intracellular accumulation of non-functional mRNA transcripts.

[0786] As in the antisense approach, the ribozymes of the invention can be composed of modified oligonucleotides (e.g., for improved stability, targeting, etc.) and should be delivered to cells which express in vivo. DNA constructs encoding the ribozyme may be introduced into the cell in the same manner as described above for the introduction of antisense encoding DNA. A preferred method of delivery involves using a DNA construct “encoding” the ribozyme under the control of a strong constitutive promoter, such as, for example, pol III or pol II promoter, so that transfected cells will produce sufficient quantities of the ribozyme to destroy endogenous messages and inhibit translation. Since ribozymes unlike antisense molecules, are catalytic, a lower intracellular concentration is required for efficiency.

[0787] Antagonist/agonist compounds may be employed to inhibit the cell growth and proliferation effects of the polypeptides of the present invention on neoplastic cells and tissues, i.e. stimulation of angiogenesis of tumors, and, therefore, retard or prevent abnormal cellular growth and proliferation, for example, in tumor formation or growth.

[0788] The antagonist/agonist may also be employed to prevent hyper-vascular diseases, and prevent the proliferation of epithelial lens cells after extracapsular cataract surgery. Prevention of the mitogenic activity of the polypeptides of the present invention may also be desirous in cases such as restenosis after balloon angioplasty.

[0789] The antagonist/agonist may also be employed to prevent the growth of scar tissue during wound healing.

[0790] The antagonist/agonist may also be employed to treat the diseases described herein.

[0791] Thus, the invention provides a method of treating disorders or diseases, including but not limited to the disorders or diseases listed throughout this application, associated with overexpression of a polynucleotide of the present invention by administering to a patient (a) an antisense molecule directed to the polynucleotide of the present invention, and/or (b) a ribozyme directed to the polynucleotide of the present invention.

[0792] Binding Peptides and Other Molecules

[0793] The invention also encompasses screening methods for identifying polypeptides and nonpolypeptides that bind polypeptides of the invention, and the binding molecules identified thereby. These binding molecules are useful, for example, as agonists and antagonists of the polypeptides of the invention. Such agonists and antagonists can be used, in accordance with the invention, in the therapeutic embodiments described in detail, below.

[0794] This method comprises the steps of:

[0795] a. contacting polypeptides of the invention with a plurality of molecules; and

[0796] b. identifying a molecule that binds the polypeptides of the invention.

[0797] The step of contacting the polypeptides of the invention with the plurality of molecules may be effected in a number of ways. For example, one may contemplate immobilizing the polypeptides on a solid support and bringing a solution of the plurality of molecules in contact with the immobilized polypeptides. Such a procedure would be akin to an affinity chromatographic process, with the affinity matrix being comprised of the immobilized polypeptides of the invention. The molecules having a selective affinity for the polypeptides can then be purified by affinity selection. The nature of the solid support, process for attachment of the polypeptides to the solid support, solvent, and conditions of the affinity isolation or selection are largely conventional and well known to those of ordinary skill in the art.

[0798] Alternatively, one may also separate a plurality of polypeptides into substantially separate fractions comprising a subset of or individual polypeptides. For instance, one can separate the plurality of polypeptides by gel electrophoresis, column chromatography, or like method known to those of ordinary skill for the separation of polypeptides. The individual polypeptides can also be produced by a transformed host cell in such a way as to be expressed on or about its outer surface (e.g., a recombinant phage). Individual isolates can then be “probed” by the polypeptides of the invention, optionally in the presence of an inducer should one be required for expression, to determine if any selective affinity interaction takes place between the polypeptides and the individual clone. Prior to contacting the polypeptides with each fraction comprising individual polypeptides, the polypeptides could first be transferred to a solid support for additional convenience. Such a solid support may simply be a piece of filter membrane, such as one made of nitrocellulose or nylon. In this manner, positive clones could be identified from a collection of transformed host cells of an expression library, which harbor a DNA construct encoding a polypeptide having a selective affinity for polypeptides of the invention. Furthermore, the amino acid sequence of the polypeptide having a selective affinity for the polypeptides of the invention can be determined directly by conventional means or the coding sequence of the DNA encoding the polypeptide can frequently be determined more conveniently. The primary sequence can then be deduced from the corresponding DNA sequence. If the amino acid sequence is to be determined from the polypeptide itself, one may use microsequencing techniques. The sequencing technique may include mass spectroscopy.

[0799] In certain situations, it may be desirable to wash away any unbound polypeptides from a mixture of the polypeptides of the invention and the plurality of polypeptides prior to attempting to determine or to detect the presence of a selective affinity interaction. Such a wash step may be particularly desirable when the polypeptides of the invention or the plurality of polypeptides are bound to a solid support.

[0800] The plurality of molecules provided according to this method may be provided by way of diversity libraries, such as random or combinatorial peptide or nonpeptide libraries which can be screened for molecules that specifically bind polypeptides of the invention. Many libraries are known in the art that can be used, e.g., chemically synthesized libraries, recombinant (e.g., phage display libraries), and in vitro translation-based libraries. Examples of chemically synthesized libraries are described in Fodor et al., 1991, Science 251:767-773; Houghten et al., 1991, Nature 354:84-86; Lam et al., 1991, Nature 354:82-84; Medynski, 1994, Bio/Technology 12:709-710;Gallop et al., 1994, J. Medicinal Chemistry 37(9):1233-1251; Ohlmeyer et al., 1993, Proc. Natl. Acad. Sci. USA 90:10922-10926; Erb et al., 1994, Proc. Natl. Acad. Sci. USA 91:11422-11426; Houghten et al., 1992, Biotechniques 13:412; Jayawickreme et al., 1994, Proc. Natl. Acad. Sci. USA 91:1614-1618; Salmon et al., 1993, Proc. Natl. Acad. Sci. USA 90:11708-11712; PCT Publication No. WO 93/20242; and Brenner and Lerner, 1992, Proc. Natl. Acad. Sci. USA 89:5381-5383.

[0801] Examples of phage display libraries are described in Scott and Smith, 1990, Science 249:386-390; Devlin et al., 1990, Science, 249:404-406; Christian, R. B., et al., 1992, J. Mol. Biol. 227:711-718); Lenstra, 1992, J. Immunol. Meth. 152:149-157; Kay et al., 1993, Gene 128:59-65; and PCT Publication No. WO 94/18318 dated Aug. 18, 1994.

[0802] In vitro translation-based libraries include but are not limited to those described in PCT Publication No. WO 91/05058 dated Apr. 18, 1991; and Mattheakis et al., 1994, Proc. Natl. Acad. Sci. USA 91:9022-9026.

[0803] By way of examples of nonpeptide libraries, a benzodiazepine library (see e.g., Bunin et al., 1994, Proc. Natl. Acad. Sci. USA 91:4708-4712) can be adapted for use. Peptoid libraries (Simon et al., 1992, Proc. Natl. Acad. Sci. USA 89:9367-9371) can also be used. Another example of a library that can be used, in which the amide functionalities in peptides have been permethylated to generate a chemically transformed combinatorial library, is described by Ostresh et al. (1994, Proc. Natl. Acad. Sci. USA 91:11138-11142).

[0804] The variety of non-peptide libraries that are useful in the present invention is great. For example, Ecker and Crooke, 1995, Bio/Technology 13:351-360 list benzodiazepines, hydantoins, piperazinediones, biphenyls, sugar analogs, beta-mercaptoketones, arylacetic acids, acylpiperidines, benzopyrans, cubanes, xanthines, aminimides, and oxazolones as among the chemical species that form the basis of various libraries.

[0805] Non-peptide libraries can be classified broadly into two types: decorated monomers and oligomers. Decorated monomer libraries employ a relatively simple scaffold structure upon which a variety functional groups is added. Often the scaffold will be a molecule with a known useful pharmacological activity. For example, the scaffold might be the benzodiazepine structure.

[0806] Non-peptide oligomer libraries utilize a large number of monomers that are assembled together in ways that create new shapes that depend on the order of the monomers. Among the monomer units that have been used are carbamates, pyrrolinones, and morpholinos. Peptoids, peptide-like oligomers in which the side chain is attached to the alpha amino group rather than the alpha carbon, form the basis of another version of non-peptide oligomer libraries. The first non-peptide oligomer libraries utilized a single type of monomer and thus contained a repeating backbone. Recent libraries have utilized more than one monomer, giving the libraries added flexibility.

[0807] Screening the libraries can be accomplished by any of a variety of commonly known methods. See, e.g., the following references, which disclose screening of peptide libraries: Parmley and Smith, 1989, Adv. Exp. Med. Biol. 251:215-218; Scott and Smith, 1990, Science 249:386-390; Fowlkes et al., 1992; BioTechniques 13:422-427; Oldenburg et al., 1992, Proc. Natl. Acad. Sci. USA 89:5393-5397; Yu et al., 1994, Cell 76:933-945; Staudt et al., 1988, Science 241:577-580; Bock et al., 1992, Nature 355:564-566; Tuerk et al., 1992, Proc. Natl. Acad. Sci. USA 89:6988-6992; Ellington et al., 1992, Nature 355:850-852; U.S. Pat. No. 5,096,815, U.S. Pat. No. 5,223,409, and U.S. Pat. No. 5,198,346, all to Ladner et al.; Rebar and Pabo, 1993, Science 263:671-673; and CT Publication No. WO 94/18318.

[0808] In a specific embodiment, screening to identify a molecule that binds polypeptides of the invention can be carried out by contacting the library members with polypeptides of the invention immobilized on a solid phase and harvesting those library members that bind to the polypeptides of the invention. Examples of such screening methods, termed “panning” techniques are described by way of example in Parmley and Smith, 1988, Gene 73:305-318; Fowlkes et al., 1992, BioTechniques 13:422-427; PCT Publication No. WO 94/18318; and in references cited herein.

[0809] In another embodiment, the two-hybrid system for selecting interacting proteins in yeast (Fields and Song, 1989, Nature 340:245-246; Chien et al., 1991, Proc. Natl. Acad. Sci. USA 88:9578-9582) can be used to identify molecules that specifically bind to polypeptides of the invention.

[0810] Where the binding molecule is a polypeptide, the polypeptide can be conveniently selected from any peptide library, including random peptide libraries, combinatorial peptide libraries, or biased peptide libraries. The term “biased” is used herein to mean that the method of generating the library is manipulated so as to restrict one or more parameters that govern the diversity of the resulting collection of molecules, in this case peptides.

[0811] Thus, a truly random peptide library would generate a collection of peptides in which the probability of finding a particular amino acid at a given position of the peptide is the same for all 20 amino acids. A bias can be introduced into the library, however, by specifying, for example, that a lysine occur every fifth amino acid or that positions 4, 8, and 9 of a decapeptide library be fixed to include only arginine. Clearly, many types of-biases can be contemplated, and the present invention is not restricted to any particular bias. Furthermore, the present invention contemplates specific types of peptide libraries, such as phage displayed peptide libraries and those that utilize a DNA construct comprising a lambda phage vector with a DNA insert.

[0812] As mentioned above, in the case of a binding molecule that is a polypeptide, the polypeptide may have about 6 to less than about 60 amino acid residues, preferably about 6 to about 10 amino acid residues, and most preferably, about 6 to about 22 amino acids. In another embodiment, a binding polypeptide has in the range of 15-100 amino acids, or 20-50 amino acids.

[0813] The selected binding polypeptide can be obtained by chemical synthesis or recombinant expression.

[0814] Other Activities

[0815] A polypeptide, polynucleotide, agonist, or antagonist of the present invention, as a result of the ability to stimulate vascular endothelial cell growth, may be employed in treatment for stimulating re-vascularization of ischemic tissues due to various disease conditions such as thrombosis, arteriosclerosis, and other cardiovascular conditions. The polypeptide, polynucleotide, agonist, or antagonist of the present invention may also be employed to stimulate angiogenesis and limb regeneration, as discussed above.

[0816] A polypeptide, polynucleotide, agonist, or antagonist of the present invention may also be employed for treating wounds due to injuries, burns, post-operative tissue repair, and ulcers since they are mitogenic to various cells of different origins, such as fibroblast cells and skeletal muscle cells, and therefore, facilitate the repair or replacement of damaged or diseased tissue.

[0817] A polypeptide, polynucleotide, agonist, or antagonist of the present invention may also be employed stimulate neuronal growth and to treat and prevent neuronal damage which occurs in certain neuronal disorders or neuro-degenerative conditions such as Alzheimer's disease, Parkinson's disease, and AIDS-related complex. A polypeptide, polynucleotide, agonist, or antagonist of the present invention may have the ability to stimulate chondrocyte growth, therefore, they may be employed to enhance bone and periodontal regeneration and aid in tissue transplants or bone grafts.

[0818] A polypeptide, polynucleotide, agonist, or antagonist of the present invention may be also be employed to prevent skin aging due to sunburn by stimulating keratinocyte growth.

[0819] A polypeptide, polynucleotide, agonist, or antagonist of the present invention may also be employed for preventing hair loss, since FGF family members activate hair-forming cells and promotes melanocyte growth. Along the same lines, a polypeptide, polynucleotide, agonist, or antagonist of the present invention may be employed to stimulate growth and differentiation of hematopoietic cells and bone marrow cells when used in combination with other cytokines.

[0820] A polypeptide, polynucleotide, agonist, or antagonist of the present invention may also be employed to maintain organs before transplantation or for supporting cell culture of primary tissues. A polypeptide, polynucleotide, agonist, or antagonist of the present invention may also be employed for inducing tissue of mesodermal origin to differentiate in early embryos.

[0821] A polypeptide, polynucleotide, agonist, or antagonist of the present invention may also increase or decrease the differentiation or proliferation of embryonic stem cells, besides, as discussed above, hematopoietic lineage.

[0822] A polypeptide, polynucleotide, agonist, or antagonist of the present invention may also be used to modulate mammalian characteristics, such as body height, weight, hair color, eye color, skin, percentage of adipose tissue, pigmentation, size, and shape (e.g., cosmetic surgery). Similarly, a polypeptide, polynucleotide, agonist, or antagonist of the present invention may be used to modulate mammalian metabolism affecting catabolism, anabolism, processing, utilization, and storage of energy.

[0823] A polypeptide, polynucleotide, agonist, or antagonist of the present invention may be used to change a mammal's mental state or physical state by influencing biorhythms, caricadic rhythms, depression (including depressive disorders), tendency for violence, tolerance for pain, reproductive capabilities (preferably by Activin or Inhibin-like activity), hormonal or endocrine levels, appetite, libido, memory, stress, or other cognitive qualities.

[0824] A polypeptide, polynucleotide, agonist, or antagonist of the present invention may also be used as a food additive or preservative, such as to increase or decrease storage capabilities, fat content, lipid, protein, carbohydrate, vitamins, minerals, cofactors or other nutritional components.

[0825] The above-recited applications have uses in a wide variety of hosts. Such hosts include, but are not limited to, human, murine, rabbit, goat, guinea pig, camel, horse, mouse, rat, hamster, pig, micro-pig, chicken, goat, cow, sheep, dog, cat, non-human primate, and human. In specific embodiments, the host is a mouse, rabbit, goat, guinea pig, chicken, rat, hamster, pig, sheep, dog or cat. In preferred embodiments, the host is a mammal. In most preferred embodiments, the host is a human.

[0826] Other Preferred Embodiments

[0827] Other preferred embodiments of the claimed invention include an isolated nucleic acid molecule comprising a nucleotide sequence which is at least 95% identical to a sequence of at least about 50 contiguous nucleotides in the nucleotide sequence of SEQ ID NO:X or the complementary strand thereto, the nucleotide sequence as defined in column 5 of Table 1A or columns 8 and 9 of Table 2 or the complementary strand thereto, and/or CDNA contained in Clone ID NO:Z.

[0828] Also preferred is a nucleic acid molecule wherein said sequence of contiguous nucleotides is included in the nucleotide sequence of the portion of SEQ ID NO:X as defined in column 5, “ORF (From-To)”, in Table 1A.

[0829] Also preferred is a nucleic acid molecule wherein said sequence of contiguous nucleotides is included in the nucleotide sequence of the portion of SEQ ID NO:X as defined in columns 8 and 9, “NT From” and “NT To” respectively, in Table 2.

[0830] Also preferred is an isolated nucleic acid molecule comprising a nucleotide sequence which is at least 95% identical to a sequence of at least about 150 contiguous nucleotides in the nucleotide sequence of SEQ ID NO:X or the complementary strand thereto, the nucleotide sequence as defined in column 5 of Table 1A or columns 8 and 9 of Table 2 or the complementary strand thereto, and/or cDNA contained in Clone ID NO:Z.

[0831] Further preferred is an isolated nucleic acid molecule comprising a nucleotide sequence which is at least 95% identical to a sequence of at least about 500 contiguous nucleotides in the nucleotide sequence of SEQ ID NO:X or the complementary strand thereto, the nucleotide sequence as defined in column 5 of Table 1A or columns 8 and 9 of Table 2 or the complementary strand thereto, and/or cDNA contained in Clone ID NO:Z.

[0832] A further preferred embodiment is a nucleic acid molecule comprising a nucleotide sequence which is at least 95% identical to the nucleotide sequence of the portion of SEQ ID NO:X defined in column 5, “ORF (From-To)”, in Table 1A.

[0833] A further preferred embodiment is a nucleic acid molecule comprising a nucleotide sequence which is at least 95% identical to the nucleotide sequence of the portion of SEQ ID NO:X defined in columns 8 and 9, “NT From” and “NT To”, respectively, in Table 2.

[0834] A further preferred embodiment is an isolated nucleic acid molecule comprising a nucleotide sequence which is at least 95% identical to the complete nucleotide sequence of SEQ ID NO:X or the complementary strand thereto, the nucleotide sequence as defined in column 5 of Table 1A or columns 8 and 9 of Table 2 or the complementary strand thereto, and/or cDNA contained in Clone ID NO:Z.

[0835] Also preferred is an isolated nucleic acid molecule which hybridizes under stringent hybridization conditions to a nucleic acid molecule comprising a nucleotide sequence of SEQ ID NO:X or the complementary strand thereto, the nucleotide sequence as defined in column 5 of Table 1A or columns 8 and 9 of Table 2 or the complementary strand thereto, and/or cDNA contained in Clone ID NO:Z, wherein said nucleic acid molecule which hybridizes does not hybridize under stringent hybridization conditions to a nucleic acid molecule having a nucleotide sequence consisting of only A residues or of only T residues.

[0836] Also preferred is a composition of matter comprising a DNA molecule which comprises the cDNA contained in Clone ID NO:Z.

[0837] Also preferred is an isolated nucleic acid molecule comprising a nucleotide sequence which is at least 95% identical to a sequence of at least 50 contiguous nucleotides of the cDNA sequence contained in Clone ID NO:Z.

[0838] Also preferred is an isolated nucleic acid molecule, wherein said sequence of at least 50 contiguous nucleotides is included in the nucleotide sequence of an open reading frame sequence encoded by cDNA contained in Clone ID NO:Z.

[0839] Also preferred is an isolated nucleic acid molecule comprising a nucleotide sequence which is at least 95% identical to sequence of at least 150 contiguous nucleotides in the nucleotide sequence encoded by cDNA contained in Clone ID NO:Z.

[0840] A further preferred embodiment is an isolated nucleic acid molecule comprising a nucleotide sequence which is at least 95% identical to sequence of at least 500 contiguous nucleotides in the nucleotide sequence encoded by cDNA contained in Clone ID NO:Z.

[0841] A further preferred embodiment is an isolated nucleic acid molecule comprising a nucleotide sequence which is at least 95% identical to the complete nucleotide sequence encoded by cDNA contained in Clone ID NO:Z.

[0842] A further preferred embodiment is a method for detecting in a biological sample a nucleic acid molecule comprising a nucleotide sequence which is at least 95% identical to a sequence of at least 50 contiguous nucleotides in a sequence selected from the group consisting of: a nucleotide sequence of SEQ ID NO:X or the complementary strand thereto; the nucleotide sequence as defined in column 5 of Table 1A or columns 8 and 9 of Table 2 or the complementary strand thereto; and a nucleotide sequence encoded by cDNA contained in Clone ID NO:Z; which method comprises a step of comparing a nucleotide sequence of at least one nucleic acid molecule in said sample with a sequence selected from said group and determining whether the sequence of said nucleic acid molecule in said sample is at least 95% identical to said selected sequence.

[0843] Also preferred is the above method wherein said step of comparing sequences comprises determining the extent of nucleic acid hybridization between nucleic acid molecules in said sample and a nucleic acid molecule comprising said sequence selected from said group. Similarly, also preferred is the above method wherein said step of comparing sequences is performed by comparing the nucleotide sequence determined from a nucleic acid molecule in said sample with said sequence selected from said group. The nucleic acid molecules can comprise DNA molecules or RNA molecules.

[0844] A further preferred embodiment is a method for identifying the species, tissue or cell type of a biological sample which method comprises a step of detecting nucleic acid molecules in said sample, if any, comprising a nucleotide sequence that is at least 95% identical to a sequence of at least 50 contiguous nucleotides in a sequence selected from the group consisting of: a nucleotide sequence of SEQ ID NO:X or the complementary strand thereto; the nucleotide sequence as defined in column 5 of Table lA or columns 8 and 9 of Table 2 or the complementary strand thereto; and a nucleotide sequence of the cDNA contained in Clone ID NO:Z.

[0845] The method for identifying the species, tissue or cell type of a biological sample can comprise a step of detecting nucleic acid molecules comprising a nucleotide sequence in a panel of at least two nucleotide sequences, wherein at least one sequence in said panel is at least 95% identical to a sequence of at least 50 contiguous nucleotides in a sequence selected from said group.

[0846] Also preferred is a method for diagnosing in a subject a pathological condition associated with abnormal structure or expression of a nucleotide sequence of SEQ ID NO:X or the complementary strand thereto; the nucleotide sequence as defined in column 5 of Table 1A or columns 8 and 9 of Table 2 or the complementary strand thereto; or the cDNA contained in Clone ID NO:Z which encodes a protein, wherein the method comprises a step of detecting in a biological sample obtained from said subject nucleic acid molecules, if any, comprising a nucleotide sequence that is at least 95% identical to a sequence of at least 50 contiguous nucleotides in a sequence selected from the group consisting of: a nucleotide sequence of SEQ ID NO:X or the complementary strand thereto; the nucleotide sequence as defined in column 5 of Table 1A or columns 8 and 9 of Table 2 or the complementary strand thereto; and a nucleotide sequence of cDNA contained in Clone ID NO:Z.

[0847] The method for diagnosing a pathological condition can comprise a step of detecting nucleic acid molecules comprising a nucleotide sequence in a panel of at least two nucleotide sequences, wherein at least one sequence in said panel is at least 95% identical to a sequence of at least 50 contiguous nucleotides in a sequence selected from said group.

[0848] Also preferred is a composition of matter comprising isolated nucleic acid molecules wherein the nucleotide sequences of said nucleic acid molecules comprise a panel of at least two nucleotide sequences, wherein at least one sequence in said panel is at least 95% identical to a sequence of at least 50 contiguous nucleotides in a sequence selected from the group consisting of: a nucleotide sequence of SEQ ID NO:X or the complementary strand thereto; the nucleotide sequence as defined in column 5 of Table 1A or columns 8 and 9 of Table 2 or the complementary strand thereto; and a nucleotide sequence encoded by cDNA contained in Clone ID NO:Z. The nucleic acid molecules can comprise DNA molecules or RNA molecules.

[0849] Also preferred is a composition of matter comprising isolated nucleic acid molecules wherein the nucleotide sequences of said nucleic acid molecules comprise a DNA microarray or “chip” of at least 1, 2, 3, 4, 5, 6, 7, 8, 9, 10, 15, 20, 25, 30, 40, 50, 100, 150, 200, 250, 300, 500, 1000, 2000, 3000, or 4000 nucleotide sequences, wherein at least one sequence in said DNA microarray or “chip” is at least 95% identical to a sequence of at least 50 contiguous nucleotides in a sequence selected from the group consisting of: a nucleotide sequence of SEQ ID NO:X wherein X is any integer as defined in Table 1A; and a nucleotide sequence encoded by a human cDNA clone identified by a cDNA “Clone ID” in Table 1A.

[0850] Also preferred is an isolated polypeptide comprising an amino acid sequence at least 90% identical to a sequence of at least about 10 contiguous amino acids in the polypeptide sequence of SEQ ID NO:Y; a polypeptide encoded by SEQ ID NO:X or the complementary strand thereto; the polypeptide encoded by the nucleotide sequence as defined in columns 8 and 9 of Table 2; and/or a polypeptide encoded by cDNA contained in Clone ID NO:Z.

[0851] Also preferred is an isolated polypeptide comprising an amino acid sequence at least 95% identical to a sequence of at least about 30 contiguous amino acids in the amino acid sequence of SEQ ID NO:Y; a polypeptide encoded by SEQ ID NO:X or the complementary strand thereto; the polypeptide encoded by the nucleotide sequence as defined in columns 8 and 9 of Table 2; and/or a polypeptide encoded by cDNA contained in Clone ID NO:Z.

[0852] Further preferred is an isolated polypeptide comprising an amino acid sequence at least 95% identical to a sequence of at least about 100 contiguous amino acids in the amino acid sequence of SEQ ID NO:Y; a polypeptide encoded by SEQ ID NO:X or the complementary strand thereto; the polypeptide encoded by the nucleotide sequence as defined in columns 8 and 9 of Table 2; and/or a polypeptide encoded by cDNA contained in Clone ID NO:Z.

[0853] Further preferred is an isolated polypeptide comprising an amino acid sequence at least 95% identical to the complete amino acid sequence of SEQ ID NO:Y; a polypeptide encoded by SEQ ID NO:X or the complementary strand thereto; the polypeptide encoded by the nucleotide sequence as defined in columns 8 and 9 of Table 2; and/or a polypeptide encoded by cDNA contained in Clone ID NO:Z.

[0854] Further preferred is an isolated polypeptide comprising an amino acid sequence at least 90% identical to a sequence of at least about 10 contiguous amino acids in the complete amino acid sequence of a polypeptide encoded by contained in Clone ID NO:Z

[0855] Also preferred is a polypeptide wherein said sequence of contiguous amino acids is included in the amino acid sequence of a portion of said polypeptide encoded by cDNA contained in Clone ID NO:Z; a polypeptide encoded by SEQ ID NO:X or the complementary strand thereto; the polypeptide encoded by the nucleotide sequence as defined in columns 8 and 9 of Table 2; and/or the polypeptide sequence of SEQ ID NO:Y.

[0856] Also preferred is an isolated polypeptide comprising an amino acid sequence at least 95% identical to a sequence of at least about 30 contiguous amino acids in the amino acid sequence of a polypeptide encoded by the cDNA contained in Clone ID NO:Z.

[0857] Also preferred is an isolated polypeptide comprising an amino acid sequence at least 95% identical to a sequence of at least about 100 contiguous amino acids in the amino acid sequence of a polypeptide encoded by cDNA contained in Clone ID NO:Z.

[0858] Also preferred is an isolated polypeptide comprising an amino acid sequence at least 95% identical to the amino acid sequence of a polypeptide encoded by the cDNA contained in Clone ID NO:Z.

[0859] Further preferred is an isolated antibody which binds specifically to a polypeptide comprising an amino acid sequence that is at least 90% identical to a sequence of at least 10 contiguous amino acids in a sequence selected from the group consisting of: a polypeptide sequence of SEQ ID NO:Y; a polypeptide encoded by SEQ ID NO:X or the complementary strand thereto; the polypeptide encoded by the nucleotide sequence as defined in columns 8 and 9 of Table 2; and a polypeptide encoded by the cDNA contained in Clone ID NO:Z. 18061 Further preferred is a method for detecting in a biological sample a polypeptide comprising an amino acid sequence which is at least 90% identical to a sequence of at least 10 contiguous amino acids in a sequence selected from the group consisting of: a polypeptide sequence of SEQ ID NO:Y; a polypeptide encoded by SEQ ID NO:X or the complementary strand thereto; the polypeptide encoded by the nucleotide sequence as defined in columns 8 and 9 of Table 2; and a polypeptide encoded by the cDNA contained in Clone ID NO:Z; which method comprises a step of comparing an amino acid sequence of at least one polypeptide molecule in said sample with a sequence selected from said group and determining whether the sequence of said polypeptide molecule in said sample is at least 90% identical to said sequence of at least 10 contiguous amino acids.

[0860] Also preferred is the above method wherein said step of comparing an amino acid sequence of at least one polypeptide molecule in said sample with a sequence selected from said group comprises determining the extent of specific binding of polypeptides in said sample to an antibody which binds specifically to a polypeptide comprising an amino acid sequence that is at least 90% identical to a sequence of at least 10 contiguous amino acids in a sequence selected from the group consisting of: a polypeptide sequence of SEQ ID NO:Y; a polypeptide encoded by SEQ ID NO:X or the complementary strand thereto; the polypeptide encoded by the nucleotide sequence as defined in columns 8 and 9 of Table 2; and a polypeptide encoded by the cDNA contained in Clone ID NO:Z.

[0861] Also preferred is the above method wherein said step of comparing sequences is performed by comparing the amino acid sequence determined from a polypeptide molecule in said sample with said sequence selected from said group.

[0862] Also preferred is a method for identifying the species, tissue or cell type of a biological sample which method comprises a step of detecting polypeptide molecules in said sample, if any, comprising an amino acid sequence that is at least 90% identical to a sequence of at least 10 contiguous amino acids in a sequence selected from the group consisting of: polypeptide sequence of SEQ ID NO:Y; a polypeptide encoded by SEQ ID NO:X or the complementary strand thereto; the polypeptide encoded by the nucleotide sequence as defined in columns 8 and 9 of Table 2; and a polypeptide encoded by the cDNA contained in Clone ID NO:Z.

[0863] Also preferred is the above method for identifying the species, tissue or cell type of a biological sample, which method comprises a step of detecting polypeptide molecules comprising an amino acid sequence in a panel of at least two amino acid sequences, wherein at least one sequence in said panel is at least 90% identical to a sequence of at least 10 contiguous amino acids in a sequence selected from the above group.

[0864] Also preferred is a method for diagnosing in a subject a pathological condition associated with abnormal structure or expression of a nucleic acid sequence identified in Table 1A or Table 2 encoding a polypeptide, which method comprises a step of detecting in a biological sample obtained from said subject polypeptide molecules comprising an amino acid sequence in a panel of at least two amino acid sequences, wherein at least one sequence in said panel is at least 90% identical to a sequence of at least 10 contiguous amino acids in a sequence selected from the group consisting of: polypeptide sequence of SEQ ID NO:Y; a polypeptide encoded by SEQ ID NO:X or the complementary strand thereto; the polypeptide encoded by the nucleotide sequence as defined in columns 8 and 9 of Table 2; and a polypeptide encoded by the cDNA contained in Clone ID NO:Z.

[0865] In any of these methods, the step of detecting said polypeptide molecules includes using an antibody.

[0866] Also preferred is an isolated nucleic acid molecule comprising a nucleotide sequence which is at least 95% identical to a nucleotide sequence encoding a polypeptide wherein said polypeptide comprises an amino acid sequence that is at least 90% identical to a sequence of at least 10 contiguous amino acids in a sequence selected from the group consisting of: polypeptide sequence of SEQ ID NO:Y; a polypeptide encoded by SEQ ID NO:X or the complementary strand thereto; the polypeptide encoded by the nucleotide sequence as defined in columns 8 and 9 of Table 2; and a polypeptide encoded by the cDNA contained in Clone ID NO:Z.

[0867] Also preferred is an isolated nucleic acid molecule, wherein said nucleotide sequence encoding a polypeptide has been optimized for expression of said polypeptide in a prokaryotic host.

[0868] Also preferred is a polypeptide molecule, wherein said polypeptide comprises an amino acid sequence selected from the group consisting of: polypeptide sequence of SEQ ID NO:Y; a polypeptide encoded by SEQ ID NO:X or the complementary strand thereto; the polypeptide encoded by the nucleotide sequence as defined in columns 8 and 9 of Table 2; and a polypeptide encoded by the cDNA contained in Clone ID NO:Z.

[0869] Further preferred is a method of making a recombinant vector comprising inserting any of the above isolated nucleic acid molecule into a vector. Also preferred is the recombinant vector produced by this method. Also preferred is a method of making a recombinant host cell comprising introducing the vector into a host cell, as well as the recombinant host cell produced by this method.

[0870] Also preferred is a method of making an isolated polypeptide comprising culturing this recombinant host cell under conditions such that said polypeptide is expressed and recovering said polypeptide. Also preferred is this method of making an isolated polypeptide, wherein said recombinant host cell is a eukaryotic cell and said polypeptide is a human protein comprising an amino acid sequence selected from the group consisting of. polypeptide sequence of SEQ ID NO:Y; a polypeptide encoded by SEQ ID NO:X or the complementary strand thereto; the polypeptide encoded by the nucleotide sequence as defined in columns 8 and 9 of Table 2; and a polypeptide encoded by the cDNA contained in Clone ID NO:Z. The isolated polypeptide produced by this method is also preferred.

[0871] Also preferred is a method of treatment of an individual in need of an increased level of a protein activity, which method comprises administering to such an individual a Therapeutic comprising an amount of an isolated polypeptide, polynucleotide, immunogenic fragment or analogue thereof, binding agent, antibody, or antigen binding fragment of the claimed invention effective to increase the level of said protein activity in said individual.

[0872] Also preferred is a method of treatment of an individual in need of a decreased level of a protein activity, which method comprised administering to such an individual a Therapeutic comprising an amount of an isolated polypeptide, polynucleotide, immunogenic fragment or analogue thereof, binding agent, antibody, or antigen binding fragment of the claimed invention effective to decrease the level of said protein activity in said individual.

[0873] Also preferred is a method of treatment of an individual in need of a specific delivery of toxic compositions to diseased cells (e.g., tumors, leukemias or lymphomas), which method comprises administering to such an individual a Therapeutic comprising an amount of an isolated polypeptide of the invention, including, but not limited to a binding agent, or antibody of the claimed invention that are associated with toxin or cytotoxic prodrugs.

[0874] Having generally described the invention, the same will be more readily understood by reference to the following examples, which are provided by way of illustration and are not intended as limiting.

TABLE 6

| ATCC Deposits | Deposit Date | ATCC Designation Number |
|---|---|---|
| LP01, LP02, LP03, LP04, | May-20-97 | 209059, 209060, 209061, |
| LP05, LP06, LP07, LP08, | | 209062, 209063, 209064, |
| LP09, LP10, LP11, | | 209065, 209066, 209067, |
| | | 209068, 209069 |
| LP12 | Jan-12-98 | 209579 |
| LP13 | Jan-12-98 | 209578 |
| LP14 | Jul-16-98 | 203067 |
| LP15 | Jul-16-98 | 203068 |
| LP16 | Feb-1-99 | 203609 |
| LP17 | Feb-1-99 | 203610 |
| LP20 | Nov-17-98 | 203485 |
| LP21 | Jun-18-99 | PTA-252 |
| LP22 | Jun-18-99 | PTA-253 |
| LP23 | Dec-22-99 | PTA-1081 |

### EXAMPLES

### Example 1

### Isolation of a Selected cDNA Clone from the Deposited Sample

[0875] Each Clone ID NO:Z is contained in a plasmid vector. Table 7 identifies the vectors used to construct the cDNA library from which each clone was isolated. In many cases, the vector used to construct the library is a phage vector from which a plasmid has been excised. The following correlates the related plasmid for each phage vector used in constructing the cDNA library. For example, where a particular clone is identified in Table 7 as being isolated in the vector “Lambda Zap,” the corresponding deposited clone is in “pBluescript.”

| Vector Used to Construct Library | Corresponding Deposited Plasmid |
|---|---|
| Lambda Zap | pBluescript (pBS) |
| Uni-Zap XR | pBluescript (pBS) |
| Zap Express | pBK |
| lafmid BA | plafmid BA |
| pSport1 | pSport1 |
| pCMVSport 2.0 | pCMVSport 2.0 |
| pCMVSport 3.0 | pCMVSport 3.0 |
| pCR ®2.1 | pCR ®2.1 |

[0876] Vectors Lambda Zap (U.S. Pat. Nos. 5,128,256 and 5,286,636), Uni-Zap XR (U.S. Pat. Nos. 5,128,256 and 5,286,636), Zap Express (U.S. Pat. Nos. 5,128,256 and 5,286,636), pBluescript (pBS) (Short, J. M. et al., Nucleic Acids Res. 16:7583-7600 (1988); Alting-Mees, M. A. and Short, J. M., Nucleic Acids Res. 17:9494 (1989)) and pBK (Alting-Mees, M. A. et al., Strategies 5:58-61 (1992)) are commercially available from Stratagene Cloning Systems, Inc., 11011 N. Torrey Pines Road, La Jolla, Calif., 92037. pBS contains an ampicillin resistance gene and pBK contains a neomycin resistance gene. Both can be transformed into E. coli strain XL-1 Blue, also available from Stratagene. pBS comes in 4 forms SK+, SK-, KS+and KS. The S and K refers to the orientation of the polylinker to the T7 and T3 primer sequences which flank the polylinker region (“S” is for SacI and “K” is for Kpnl which are the first sites on each respective end of the linker). “+” or “−” refer to the orientation of the fl origin of replication (“ori”), such that in one orientation, single stranded rescue initiated from the fl ori generates sense strand DNA and in the other, antisense.

[0877] Vectors pSportl, pCMVSport 2.0 and pCMVSport 3.0, were obtained from Life Technologies, Inc., P. O. Box 6009, Gaithersburg, Md. 20897. All Sport vectors contain an ampicillin resistance gene and may be transformed into E. coli strain DH10B, also available from Life Technologies. (See, for instance, Gruber, C. E., et at., Focus 15:59 (1993)). Vector lafmid BA (Bento Soares, Columbia University, NY) contains an ampicillin resistance gene and can be transformed into E. coli strain XL-1 Blue. Vector pCR®2.1, which is available from Invitrogen, 1600 Faraday Avenue, Carlsbad, Calif. 92008, contains an ampicillin resistance gene and may be transformed into E. coli strain DH10B, available from Life Technologies. (See, for instance, Clark, J. M., Nuc. Acids Res. 16:9677-9686 (1988) and Mead, D. et al., Bio/Technotogy 9: (1991)). Preferably, a polynucleotide of the present invention does not comprise the phage vector sequences identified for the particular clone in Table 7, as well as the corresponding plasmid vector sequences designated above.

[0878] The deposited material in the sample assigned the ATCC Deposit Number cited by reference to Tables 1, 2, 6 and 7 for any given cDNA clone also may contain one or more additional plasmids, each comprising a cDNA clone different from that given clone. Thus, deposits sharing the same ATCC Deposit Number contain at least a plasmid for each Clone ID NO:Z.

TABLE 7

| | | | ATCC |
|---|---|---|---|
| Libraries owned by Catalog | Catalog Description | Vector | Deposit |
| HUKA HUKB HUKC HUKD HUKE | Human Uterine Cancer | Lambda ZAP II | LP01 |
| HUKF HUKG | | | |
| HCNA HCNB | Human Colon | Lambda Zap II | LP01 |
| HFFA | Human Fetal Brain, random primed | Lambda Zap II | LP01 |
| HTWA | Resting T-Cell | Lambda ZAP II | LP01 |
| HBQA | Early Stage Human Brain, random | Lambda ZAP II | LP01 |
| | primed | | |
| HLMB HLMF HLMG HLMH HLMI | breast lymph node CDNA library | Lambda ZAP II | LP01 |
| HLMJ HLMM HLMN | | | |
| HCQA HCQB | human colon cancer | Lambda ZAP II | LP01 |
| HMEA HMEC HMED HMEE HMEF | Human Microvascular Endothelial | Lambda ZAP II | LP01 |
| HMEG HMEI HMEJ HMEK HMEL | Cells, fract. A | | |
| HUSA HUSC | Human Umbilical Vein Endothelial | Lambda ZAP II | LP01 |
| | Cells, fract. A | | |
| HLQA HLQB | Hepatocellular Tumor | Lambda ZAP II | LP01 |
| HHGA HHGB HHGC HHGD | Hemangiopericytoma | Lambda ZAP II | LP01 |
| HSDM | Human Striatum Depression, re-rescue | Lambda ZAP II | LP01 |
| HUSH | H Umbilical Vein Endothelial Cells, | Lambda ZAP II | LP01 |
| | frac A, re-excision | | |
| HSGS | Salivary gland, subtracted | Lambda ZAP II | LP01 |
| HFXA HFXB HFXC HFXD HFXE | Brain frontal cortex | Lambda ZAP II | LP01 |
| HFXF HFXG HFXH | | | |
| HPQA HPQB HPQC | PERM TF274 | Lambda ZAP II | LP01 |
| HFXJ HFXK | Brain Frontal Cortex, re-excision | Lambda ZAP II | LP01 |
| HCWA HCWB HCWC HCWD HCWE | CD34 positive cells (Cord Blood) | ZAP Express | LP02 |
| HCWF HCWG HCWH HCWI HCWJ | | | |
| HCWK | | | |
| HCUA HCUB HCUC | CD34 depleted Buffy Coat (Cord | ZAP Express | LP02 |
| | Blood) | | |
| HRSM | A-14 cell line | ZAP Express | LP02 |
| HRSA | A1-CELL LINE | ZAP Express | LP02 |
| HCUD HCUE HCUF HCUG HCUH | CD34 depleted Buffy Coat (Cord | ZAP Express | LP02 |
| HCUI | Blood), re-excision | | |
| HBXE HBXF HBXG | H. Whole Brain #2, re-excision | ZAP Express | LP02 |
| HRLM | L8 cell line | ZAP Express | LP02 |
| HBXA HBXB HBXC HBXD | Human Whole Brain #2 - Oligo dT> | ZAP Express | LP02 |
| | 1.5 Kb | | |
| HUDA HUDB HUDC | Testes | ZAP Express | LP02 |
| HHTM HHTN HHTO | H. hypothalamus, frac A;re-excision | ZAP Express | LP02 |
| HHTL | H. hypothalamus, frac A | ZAP Express | LP02 |
| HASA HASD | Human Adult Spleen | Uni-ZAP XR | LP03 |
| HFKC HFKD HFKE HFKF HFKG | Human Fetal Kidney | Uni-ZAP XR | LP03 |
| HE8A HE8B HE8C HE8D HE8E HE8F | Human 8 Week Whole Embryo | Uni-ZAP XR | LP03 |
| HE8M HE8N | | | |
| HGBA HGBD HGBE HGBF HGBG | Human Gall Bladder | Uni-ZAP XR | LP03 |
| HGBH HGBI | | | |
| HLHA HLHB HLHC HLHD HLHE | Human Fetal Lung III | Uni-ZAP XR | LP03 |
| HLHF HLHG HLHH HLHQ | | | |
| HPMA HPMB HPMC HPMD HPME | Human Placenta | Uni-ZAP XR | LP03 |
| HPMF HPMG HPMH | | | |
| HPRA HPRB HPRC HPRD | Human Prostate | Uni-ZAP XR | LP03 |
| HSIA HSIC HSID HSIE | Human Adult Small Intestine | Uni-ZAP XR | LP03 |
| HTEA HTEB HTEC HTED HTEE | Human Testes | Uni-ZAP XR | LP03 |
| HTEF HTEG HTEH HTEI HTEJ HTEK | | | |
| HTPA HTPB HTPC HTPD HTPE | Human Pancreas Tumor | Uni-ZAP XR | LP03 |
| HTTA HTTB HTTC HTTD HTTE | Human Testes Tumor | Uni-ZAP XR | LP03 |
| HTTF | | | |
| HAPA HAPB HAPC HAPM | Human Adult Pulmonary | Uni-ZAP XR | LP03 |
| HETA HETB HETC HETD HETE | Human Endometrial Tumor | Uni-ZAP XR | LP03 |
| HETF HETG HETH HETI | | | |
| HHFB HHFC HHFD HHFE HHFF | Human Fetal Heart | Uni-ZAP XR | LP03 |
| HHFG HHFH HHFI | | | |
| HHPB HHPC HHPD HHPE HHPF | Human Hippocampus | Uni-ZAP XR | LP03 |
| HHPG HHPH | | | |
| HCE1 HCE2 HCE3 HCE4 HCE5 HCEB | Human Cerebellum | Uni-ZAP XR | LP03 |
| HCEC HCED HCEE HCEF HCEG | | | |
| HUVB HUVC HUVD HUVE | Human Umbilical Vein, Endo. remake | Uni-ZAP XR | LP03 |
| HSTA HSTB HSTC HSTD | Human Skin Tumor | Uni-ZAP XR | LP03 |
| HTAA HTAB HTAC HTAD HTAE | Human Activated T-Cells | Uni-ZAP XR | LP03 |
| HFEA HFEB HFEC | Human Fetal Epithelium (Skin) | Uni-ZAP XR | LP03 |
| HJPA HJPB HJPC HJPD | HUMAN JURKAT MEMBRANE | Uni-ZAP XR | LP03 |
| | BOUND POLYSOMES | | |
| HESA | Human epithelioid sarcoma | Uni-Zap XR | LP03 |
| HLTA HLTB HLTC HLTD HLTE | Human T-Cell Lymphoma | Uni-ZAP XR | LP03 |
| HLTF | | | |
| HFTA HFTB HFTC HFTD | Human Fetal Dura Mater | Uni-ZAP XR | LP03 |
| HRDA HRDB HRDC HRDD HRDE | Human Rhabdomyosarcoma | Uni-ZAP XR | LP03 |
| HRDF | | | |
| HCAA HCAB HCAC | Cem cells cyclohexamide treated | Uni-ZAP XR | LP03 |
| HRGA HRGB HRGC HRGD | Raji Cells, cyclohexamide treated | Uni-ZAP XR | LP03 |
| HSUA HSUB HSUC HSUM | Supt Cells, cyclohexamide treated | Uni-ZAP XR | LP03 |
| HT4A HT4C HT4D | Activated T-Cells, 12 hrs. | Uni-ZAP XR | LP03 |
| HE9A HE9B HE9C HE9D HE9E HE9F | Nine Week Old Early Stage Human | Uni-ZAP XR | LP03 |
| HE9G HE9H HE9M HE9N | | | |
| HATA HATB HATC HATD HATE | Human Adrenal Gland Tumor | Uni-ZAP XR | LP03 |
| HT5A | Activated T-Cells, 24 hrs. | Uni-ZAP XR | LP03 |
| HFGA HFGM | Human Fetal Brain | Uni-ZAP XR | LP03 |
| HNEA HNEB HNEC HNED HNEE | Human Neutrophil | Uni-ZAP XR | LP03 |
| HBGB HBGD | Human Primary Breast Cancer | Uni-ZAP XR | LP03 |
| HBNA HBNB | Human Normal Breast | Uni-ZAP XR | LP03 |
| HCAS | Cem Cells, cyclohexamide treated, | Uni-ZAP XR | LP03 |
| | subtra | | |
| HHPS | Human Hippocampus, subtracted | pBS | LP03 |
| HKCS HKCU | Human Colon Cancer, subtracted | pBS | LP03 |
| HRGS | Raji cells, cyclohexamide treated, | pBS | LP03 |
| | subtracted | | |
| HSUT | Supt cells, cyclohexamide treated, | pBS | LP03 |
| | differentially expressed | | |
| HT4S | Activated T-Cells, 12 hrs, subtracted | Uni-ZAP XR | LP03 |
| HCDA HCDB HCDC HCDD HCDE | Human Chondrosarcoma | Uni-ZAP XR | LP03 |
| HOAA HOAB HOAC | Human Osteosarcoma | Uni-ZAP XR | LP03 |
| HTLA HTLB HTLC HTLD HTLE | Human adult testis, large inserts | Uni-ZAP XR | LP03 |
| HTLF | | | |
| HLMA HLMC HLMD | Breast Lymph node cDNA library | Uni-ZAP XR | LP03 |
| H6EA H6EB H6EC | HL-60. PMA 4H | Uni-ZAP XR | LP03 |
| HTXA HTXB HTXC HTXD HTXE | Activated T-Cell (l2 hs)/Thiouridine | Uni-ZAP XR | LP03 |
| HTXF HTXG HTXH | labelledEco | | |
| HNFA HNFB HNFC HNFD HNFE | Human Neutrophil, Activated | Uni-ZAP XR | LP03 |
| HNFF HNFG HNFH HNFJ | | | |
| HTOB HTOC | HUMAN TONSILS, FRACTION 2 | Uni-ZAP XR | LP03 |
| HMGB | Human OB MG63 control fraction I | Uni-ZAP XR | LP03 |
| HOPB | Human OB HOS control fraction I | Uni-ZAP XR | LP03 |
| HORB | Human OB HOS treated (10 nM E2) | Uni-ZAP XR | LP03 |
| | fraction I | | |
| HSVA HSVB HSVC | Human Chronic Synovitis | Uni-ZAP XR | LP03 |
| HROA | HUMAN STOMACH | Uni-ZAP XR | LP03 |
| HBJA HBJB HBJC HBJD HBJE HBJF | HUMAN B CELL LYMPHOMA | Uni-ZAP XR | LP03 |
| HBJG HBJH HBJI HBJJ HBJK | | | |
| HCRA HCRB HCRC | human corpus colosum | Uni-ZAP XR | LP03 |
| HODA HODB HODC HODD | human ovarian cancer | Uni-ZAP XR | LP03 |
| HDSA | Dermatofibrosarcoma Protuberance | Uni-ZAP XR | LP03 |
| HMWA HMWB HMWC HMWD | Bone Marrow Cell Line (RS4;11) | Uni-ZAP XR | LP03 |
| HMWE HMWF HMWG HMWH | | | |
| HMWI HMWJ | | | |
| HSOA | stomach cancer (human) | Uni-ZAP XR | LP03 |
| HERA | SKIN | Uni-ZAP XR | LP03 |
| HMDA | Brain-medulloblastoma | Uni-ZAP XR | LP03 |
| HGLA HGLB HGLD | Glioblastoma | Uni-ZAP XR | LP03 |
| HEAA | H. Atrophic Endometrium | Uni-ZAP XR | LP03 |
| HBCA HBCB | H. Lymph node breast Cancer | Uni-ZAP XR | LP03 |
| HPWT | Human Prostate BPH, re-excision | Uni-ZAP XR | LP03 |
| HFVG HFVH HFVI | Fetal Liver, subtraction II | pBS | LP03 |
| HNFI | Human Neutrophils, Activated, re- | pBS | LP03 |
| | excision | | |
| HBMB HBMC HBMD | Human Bone Marrow, re-excision | pBS | LP03 |
| HKML HKMM HKMN | H. Kidney Medulla, re-excision | pBS | LP03 |
| HKIX HKIY | H. Kidney Cortex, subtracted | pBS | LP03 |
| HADT | H. Amygdala Depression, subtracted | pBS | LP03 |
| H6AS | Hl-60, untreated, subtracted | Uni-ZAP XR | LP03 |
| H6ES | HL-60, PMA 4H, subtracted | Uni-ZAP XR | LP03 |
| H6BS | HL-60, RA 4h, Subtracted | Uni-ZAP XR | LP03 |
| H6CS | HL-60, PMA 1d, subtracted | Uni-ZAP XR | LP03 |
| HTXJ HTXK | Activated T-cell(12 h)/Thiouridine-re- | Uni-ZAP XR | LP03 |
| | excision | | |
| HMSA HMSB HMSC HMSD HMSE | Monocyte activated | Uni-ZAP XR | LP03 |
| HMSF HMSG HMSH HMSI HMSJ | | | |
| HMSK | | | |
| HAGA HAGB HAGC HAGD HAGE | Human Amygdala | Uni-ZAP XR | LP03 |
| HAGF | | | |
| HSRA HSRB HSRE | STROMAL -OSTEOCLASTOMA | Uni-ZAP XR | LP03 |
| HSRD HSRF HSRG HSRH | Human Osteoclastoma Stromal Cells - | Uni-ZAP XR | LP03 |
| | unamplified | | |
| HSQA HSQB HSQC HSQD HSQE | Stromal cell TF274 | Uni-ZAP XR | LP03 |
| HSQF HSQG | | | |
| HSKA HSKB HSKC HSKD HSKE | Smooth muscle, serum treated | Uni-ZAP XR | LP03 |
| HSKF HSKZ | | | |
| HSLA HSLB HSLC HSLD HSLE | Smooth muscle, control | Uni-ZAP XR | LP03 |
| HSLF HSLG | | | |
| HSDA HSDD HSDE HSDF HSDG | Spinal cord | Uni-ZAP XR | LP03 |
| HSDH | | | |
| HPWS | Prostate-BPH subtracted II | pBS | LP03 |
| HSKW HSKX HSKY | Smooth Muscle- HASTE normalized | pBS | LP03 |
| HFPB HFPC HFPD | H. Frontal cortex, epileptic;re-excision | Uni-ZAP XR | LP03 |
| HSDI HSDJ HSDK | Spinal Cord, re-excision | Uni-ZAP XR | LP03 |
| HSKN HSKO | Smooth Muscle Serum Treated, Norm | pBS | LP03 |
| HSKG HSKH HSKI | Smooth muscle, serum induced, re-exc | pBS | LP03 |
| HFCA HFCB HFCC HFCD HFCE | Human Fetal Brain | Uni-ZAP XR | LP04 |
| HFCF | | | |
| HPTA HPTB HPTD | Human Pituitary | Uni-ZAP XR | LP04 |
| HTHB HTHC HTHD | Human Thymus | Uni-ZAP XR | LP04 |
| HE6B HE6C HE6D HE6E HE6F HE6G | Human Whole Six Week Old Embryo | Uni-ZAP XR | LP04 |
| HE6S | | | |
| HSSA HSSB HSSC HSSD HSSE HSSF | Human Synovial Sarcoma | Uni-ZAP XR | LP04 |
| HSSG HSSH HSSI HSSJ HSSK | | | |
| HE7T | 7 Week Old Early Stage Human, | Uni-ZAP XR | LP04 |
| | subtracted | | |
| HEPA HEPB HEPC | Human Epididymus | Uni-ZAP XR | LP04 |
| HSNA HSNB HSNC HSNM HSNN | Human Synovium | Uni-ZAP XR | LP04 |
| HPFB HPFC HPFD HPFE | Human Prostate Cancer, Stage C | Uni-ZAP XR | LP04 |
| | fraction | | |
| HE2A HE2D HE2E HE2H HE2I HE2M | 12 Week Old Early Stage Human | Uni-ZAP XR | LP04 |
| HE2N HE2O | | | |
| HE2B HE2C HE2F HE2G HE2P HE2Q | 12 Week Old Early Stage Human, II | Uni-ZAP XR | LP04 |
| HPTS HPTT HPTU | Human Pituitary, subtracted | Uni-ZAP XR | LP04 |
| HAUA HAUB HAUC | Amniotic Cells - TNF induced | Uni-ZAP XR | LP04 |
| HAQA HAQB HAQC HAQD | Amniotic Cells - Primary Culture | Uni-ZAP XR | LP04 |
| HWTA HWTB HWTC | wilm's tumor | Uni-ZAP XR | LP04 |
| HBSD | Bone Cancer, re-excision | Uni-ZAP XR | LP04 |
| HSGB | Salivary gland, re-excision | Uni-ZAP XR | LP04 |
| HSJA HSJB HSJC | Smooth muscle-ILb induced | Uni-ZAP XR | LP04 |
| HSXA HSXB HSXC HSXD | Human Substantia Nigra | Uni-ZAP XR | LP04 |
| HSHA HSHB HSHC | Smooth muscle, IL1b induced | Uni-ZAP XR | LP04 |
| HOUA HOUB HOUC HOUD HOUE | Adipocytes | Uni-ZAP XR | LP04 |
| HPWA HPWB HPWC HPWD HPWE | Prostate BPH | Uni-ZAP XR | LP04 |
| HELA HELB HELC HELD HELE | Endothelial cells-control | Uni-ZAP XR | LP04 |
| HELF HELG HELH | | | |
| HEMA HEMB HEMC HEMD HEME | Endothelial-induced | Uni-ZAP XR | LP04 |
| HEMF HEMG HEMH | | | |
| HBIA HBIB HBIC | Human Brain, Striatum | Uni-ZAP XR | LP04 |
| HHSA HHSB HHSC HHSD HHSE | Human Hypothalmus, Schizophrenia | Uni-ZAP XR | LP04 |
| HNGA HNGB HNGC HNGD HNGE | neutrophils control | Uni-ZAP XR | LP04 |
| HNGF HNGG HNGH HNGI HNGJ | | | |
| HNHA HNHB HNHC HNHD HNHE | Neutrophils IL-1 and LPS induced | Uni-ZAP XR | LP04 |
| HNHF HNHG HNHH HNHI HNHJ | | | |
| HSDB HSDC | STRIATUM DEPRESSION | Uni-ZAP XR | LP04 |
| HHPT | Hypothalamus | Uni-ZAP XR | LP04 |
| HSAT HSAU HSAV HSAW HSAX | Anergic T-cell | Uni-ZAP XR | LP04 |
| HSAY HSAZ | | | |
| HBMS HBMT HBMU HBMV HBMW | Bone marrow | Uni-ZAP XR | LP04 |
| HBMX | | | |
| HOEA HOEB HOEC HOED HOEE | Osteoblasts | Uni-ZAP XR | LP04 |
| HOEF HOEJ | | | |
| HAIA HAIB HAIC HAID HAIE HAIF | Epithelial-TNFa and INF induced | Uni-ZAP XR | LP04 |
| HTGA HTGB HTGC HTGD | Apoptotic T-cell | Uni-ZAP XR | LP04 |
| HMCA HMCB HMCC HMCD HMCE | Macrophage-oxLDL | Uni-ZAP XR | LP04 |
| HMAA HMAB HMAC HMAD HMAE | Macrophage (GM-CSF treated) | Uni-ZAP XR | LP04 |
| HMAF HMAG | | | |
| HPHA | Normal Prostate | Uni-ZAP XR | LP04 |
| HPIA HPIB HPIC | LNCAP prostate cell line | Uni-ZAP XR | LP04 |
| HPJA HPJB HPJC | PC3 Prostate cell line | Uni-ZAP XR | LP04 |
| HOSE HOSF HOSG | Human Osteoclastoma, re-excision | Uni-ZAP XR | LP04 |
| HTGE HTGF | Apoptotic T-cell, re-excision | Uni-ZAP XR | LP04 |
| HMAJ HMAK | H Macrophage (GM-CSF treated), re- | Uni-ZAP XR | LP04 |
| | excision | | |
| HACB HACC HACD | Human Adipose Tissue, re-excision | Uni-ZAP XR | LP04 |
| HFPA | H. Frontal Cortex, Epileptic | Uni-ZAP XR | LP04 |
| HFAA HFAB HFAC HFAD HFAE | Alzheimer's, spongy change | Uni-ZAP XR | LP04 |
| HFAM | Frontal Lobe, Dementia | Uni-ZAP XR | LP04 |
| HMIA HMIB HMIC | Human Manic Depression Tissue | Uni-ZAP XR | LP04 |
| HTSA HTSE HTSF HTSG HTSH | Human Thymus | pBS | LP05 |
| HPBA HPBB HPBC HPBD HPBE | Human Pineal Gland | pBS | LP05 |
| HSAA HSAB HSAC | HSA 172 Cells | pBS | LP05 |
| HSBA HSBB HSBC HSBM | HSC172 cells | pBS | LP05 |
| HJAA HJAB HJAC HJAD | Jurkat T-cell G1 phase | pBS | LP05 |
| HJBA HJBB HJBC HJBD | Jurkat T-Cell, S phase | pBS | LP05 |
| HAFA HAFB | Aorta endothelial cells + TNF-a | pBS | LP05 |
| HAWA HAWB HAWC | Human White Adipose | pBS | LP05 |
| HTNA HTNB | Human Thyroid | pBS | LP05 |
| HONA | Normal Ovary, Premenopausal | pBS | LP05 |
| HARA HARB | Human Adult Retina | pBS | LP05 |
| HLJA HLJB | Human Lung | pCMVSport 1 | LP06 |
| HOFM HOFN HOFO | H. Ovarian Tumor, II, OV5232 | pCMVSport 2.0 | LP07 |
| HOGA HOGB HOGC | OV 10-3-95 | pCMVSport 2.0 | LP07 |
| HCGL | CD34+cells, II | pCMVSport 2.0 | LP07 |
| HDLA | Hodgkin's Lymphoma I | pCMVSport 2.0 | LP07 |
| HDTA HDTB HDTC HDTD HDTE | Hodgkin's Lymphoma II | pCMVSport 2.0 | LP07 |
| HKAA HKAB HKAC HKAD HKAE | Keratinocyte | pCMVSport2.0 | LP07 |
| HKAF HKAG HKAH | | | |
| HCIM | CAPFINDER, Crohn's Disease, lib 2 | pCMVSport2.0 | LP07 |
| HKAL | Keratinocyte, lib 2 | pCMVSport2.0 | LP07 |
| HKAT | Keratinocyte, lib 3 | pCMVSport2.0 | LP07 |
| HNDA | Nasal polyps | pCMVSport2.0 | LP07 |
| HDRA | H. Primary Dendritic Cells, lib 3 | pCMVSport2.0 | LP07 |
| HOHA HOHB HOHC | Human Osteoblasts II | pCMVSport2.0 | LP07 |
| HLDA HLDB HLDC | Liver, Hepatoma | pCMVSport3.0 | LP08 |
| HLDN HLDO HLDP | Human Liver, normal | pCMVSport3.0 | LP08 |
| HMTA | pBMC stimulated w/ poly I/C | pCMVSport3.0 | LP08 |
| HNTA | NTERA2, control | pCMVSport3.0 | LP08 |
| HDPA HDPB HDPC HDPD HDPF | Primary Dendritic Cells, lib 1 | pCMVSport3.0 | LP08 |
| HDPG HDPH HDPI HDPJ HDPK | | | |
| HDPM HDPN HDPO HDPP | Primary Dendritic cells, frac 2 | pCMVSport3.0 | LP08 |
| HMUA HMUB HMUC | Myoloid Progenitor Cell Line | pCMVSport3.0 | LP08 |
| HHEA HHEB HHEC HHED | T Cell helper I | pCMVSport3.0 | LP08 |
| HHEM HHEN HHEO HHEP | T cell helper II | pCMVSport3.0 | LP08 |
| HEQA HEQB HEQC | Human endometrial stromal cells | pCMVSport3.0 | LP08 |
| HJMA HJMB | Human endometrial stromal cells- | pCMVSport3.0 | LP08 |
| | treated with progesterone | | |
| HSWA HSWB HSWC | Human endometrial stromal cells- | pCMVSport3.0 | LP08 |
| | treated with estradiol | | |
| HSYA HSYB HSYC | Human Thymus Stromal Cells | pCMVSport3.0 | LP08 |
| HLWA HLWB HLWC | Human Placenta | pCMVSport3 0 | LP08 |
| HRAA HRAB HRAC | Rejected Kidney, lib 4 | pCMVSport3.0 | LP08 |
| HMTM | PCR, pBMC I/C treated | PCRII | LP09 |
| HMJA | H Meniingima, M6 | pSport 1 | LP10 |
| HMKA HMKB HMKC HMKD HMKE | H. Meningima, M1 | pSport 1 | LP10 |
| HUSG HUSI | Human umbilical vein endothelial cells, | pSport I | LP10 |
| | IL-4 induced | | |
| HUSX HUSY | Human Umbilical Vein Endothelial | pSport 1 | LP10 |
| | Cells, uninduced | | |
| HOFA | Ovarian Tumor I, 0V5232 | pSport 1 | LP10 |
| HCFA HCFB HCFC HCFD | T-Cell PHA 16 hrs | pSport 1 | LP10 |
| HCFL HCFM HCFN HCFO | T-Cell PHA 24 hrs | pSport 1 | LP10 |
| HADA HADC HADD HADE HADF | Human Adipose | pSport 1 | LP10 |
| HADG | | | |
| HOVA HOVB HOVC | Human Ovary | pSport 1 | LP10 |
| HTWB HTWC HTWD HTWE HTWF | Resting T-Cell Library, II | pSport 1 | LP10 |
| HMMA | Spleen metastic melanoma | pSport 1 | LP10 |
| HLYA HLYB HLYC HLYD HLYE | Spleen, Chronic lymphocytic leukemia | pSport 1 | LP10 |
| HCGA | CD34+ cell, I | pSport 1 | LP10 |
| HEOM HEON | Human Eosinophils | pSport 1 | LP10 |
| HTDA | Human Tonsil, Lib 3 | pSport 1 | LP10 |
| HSPA | Salivary Gland, Lib 2 | pSport 1 | LP10 |
| HCHA HCHB HCHC | Breast Cancer cell line, MDA 36 | pSport 1 | LP10 |
| HCHM HCHN | Breast Cancer Cell line, angiogenic | pSport 1 | LP10 |
| HCIA | Crohn's Disease | pSport 1 | LP10 |
| HDAA HDAB HDAC | HEL cell line | pSport 1 | LP10 |
| HABA | Human Astrocyte | pSport 1 | LP10 |
| HUFA HUFB HUFC | Ulcerative Colitis | pSport 1 | LP10 |
| HNTM | NTERA2+ retinoic acid, 14 days | pSport 1 | LP10 |
| HDQA | Primary Dendritic cells, CapFinder2, | pSport 1 | LP10 |
| | frac 1 | | |
| HDQM | Primary Dendritic Cells, CapFinder, | pSport 1 | LP10 |
| | frac 2 | | |
| HLDX | Human Liver, normal, CapFinder | pSport 1 | LP10 |
| HULA HULB HULC | Human Dermal Endothelial | pSport1 | LP10 |
| | Cells, untreated | | |
| HUMA | Human Dermal Endothelial cells, treated | pSport1 | LP10 |
| HCJA | Human Stromal Endometrial | pSport1 | LP10 |
| | fibroblasts, untreated | | |
| HCJM | Human Stromal endometrial fibroblasts, | pSPort1 | LP10 |
| | treated w/ estradiol | | |
| HEDA | Human Stromal endometrial fibroblasts, | pSPort1 | LP10 |
| | treated with progesterone | | |
| HFNA | Human ovary tumor cell 0V350721 | pSPort1 | LP10 |
| HKGA HKGB HKGC HKGD | Merkel Cells | pSPort1 | LP10 |
| HISA HISB HISC | Pancreas Islet Cell Tumor | pSPort1 | LP10 |
| HLSA | Skin, burned | pSPort1 | LP10 |
| HBZA | Prostate, BPH, Lib 2 | pSport 1 | LP10 |
| HBZS | Prostate BPH, Lib 2, subtracted | pSport 1 | LP10 |
| HFIA HFIB HFIC | Synovial Fibroblasts (control) | pSport 1 | LP10 |
| HFIH HFII HFIJ | Synovial hypoxia | pSport 1 | LP10 |
| HFIT HFIU HFIV | Synovial IL-1/TNF stimulated | pSport 1 | LP10 |
| HGCA | Messangial cell, frac 1 | pSPort1 | LP10 |
| HMVA HMVB HMVC | Bone Marrow Stromal Cell, untreated | pSPort1 | LP10 |
| HFIX HFIY HFIZ | Synovial Fibroblasts (I11/TNF), subt | pSPort1 | LP10 |
| HFOX HFOY HFOZ | Synovial hypoxia-RSF subtracted | pSport1 | LP10 |
| HMQA HMQB HMQC HMQD | Human Activated Monocytes | Uni-ZAP XR | LP11 |
| HLIA HLIB HLIC | Human Liver | pCMVSport1 | LP012 |
| HHBA HHBB HHBC HHBD HHBE | Human Heart | pCMVSport 1 | LP012 |
| HBBA HBBB | Human Brain | pCMVSport 1 | LP012 |
| HLJA HHLJB HLJC HLJD HLJE | Human Lung | pCMVSport 1 | LP012 |
| HOGA HOGB HOGC | Ovarian Tumor | pCMVSport 2.0 | LP012 |
| HTJM | Human Tonsils, Lib 2 | pCMVSport 2.0 | LP012 |
| HAMF HAMG | KMH2 | pCMVSport 3.0 | LP012 |
| HAJA HAJB HAJC | L428 | pCMVSport 3.0 | LP012 |
| HWBA HWBB HWBC HWBD HWBE | Dendritic cells, pooled | pCMVSport 3.0 | LP012 |
| HWAA HWAB HWAC HWAD HWAE | Human Bone Marrow, treated | pCMVSport 3.0 | LP012 |
| HYAA HYAB HYAC | B Cell lymphoma | pCMVSport 3.0 | LP012 |
| HWHG HWHH HWHI | Healing groin wound, 6.5 hours post | pCMVSport 3.0 | LP012 |
| | incision | | |
| HWHP HWHQ HWHR | Healing groin wound; 7.5 hours post | pCMVSport 3.0 | LP012 |
| | incision | | |
| HARM | Healing groin wound - zero hr post- | pCMVSport 3.0 | LP012 |
| | incision (control) | | |
| HBIM | Olfactory epithelium; nasalcavity | pCMVSport 3.0 | LP012 |
| HWDA | Healing Abdomen wound; 70&90 min | pCMVSport 3.0 | LP012 |
| | post incision | | |
| HWEA | Healing Abdomen Wound;15 days post | pCMVSport 3.0 | LP012 |
| | incision | | |
| HWJA | Healing Abdomen Wound;21&29 days | pCMVSport 3.0 | LP012 |
| HNAL | Human Tongue, frac 2 | pSport1 | LP012 |
| HMJA | H. Meniingima, M6 | pSport1 | LP012 |
| HMKA HMKB HMKC HMKD HMKE | H. Meningima, M1 | pSport1 | LP012 |
| HOFA | Ovarian Tumor I, 0V5232 | pSport1 | LP012 |
| HCFA HCFB HCFC HCFD | T-Cell PHA 16 hrs | pSport1 | LP012 |
| HCFL HCFM HCFN HCFO | T-Cell PHA 24 hrs | pSport1 | LP012 |
| HMMA HMMB HMMC | Spleen metastic melanoma | pSport1 | LP012 |
| HTDA | Human Tonsil, Lib 3 | pSport1 | LP012 |
| HDBA | Human Fetal Thymus | pSport1 | LP012 |
| HDUA | Pericardium | pSport1 | LP012 |
| HBZA | Prostate, BPH, Lib 2 | pSport1 | LP012 |
| HWCA | Larynx tumor | pSport1 | LP012 |
| HWKA | Normal lung | pSport1 | LP012 |
| HSMB | Bone marrow stroma, treated | pSport1 | LP012 |
| HBHM | Normal trachea | pSport1 | LP012 |
| HLFC | Human Larynx | pSport1 | LP012 |
| HLRB | Siebben Polyposis | pSport1 | LP012 |
| HNIA | Mammary Gland | pSport1 | LP012 |
| HNJB | Palate carcinoma | pSport1 | LP012 |
| HNKA | Palate normal | pSport1 | LP012 |
| HMZA | Pharynx carcinoma | pSport1 | LP012 |
| HABG | Cheek Carcinoma | pSport1 | LP012 |
| HMZM | Pharynx Carcinoma | pSport1 | LP012 |
| HDRM | Larynx Carcinoma | pSport1 | LP012 |
| HVAA | Pancreas normal PCA4 No | pSport1 | LP012 |
| HICA | Tongue carcinoma | pSport1 | LP012 |
| HUKA HUKB HUKC HUKD HUKE | Human Uterine Cancer | Lambda ZAP II | LP013 |
| HFFA | Human Fetal Brain, random primed | Lambda ZAP II | LP013 |
| HTUA | Activated T-cell labeled with 4-thioluri | Lambda ZAP II | LP013 |
| HBQA | Early Stage Human Brain, random | Lambda ZAP II | LP013 |
| | primed | | |
| HMEB | Human microvascular Endothelial cells, | Lambda ZAP II | LP013 |
| | fract. B | | |
| HUSH | Human Umbilical Vein Endothelial | Lambda ZAP II | LP013 |
| | cells, fract. A, re-excision | | |
| HLQC HLQD | Hepatocellular tumor, re-excision | Lambda ZAP II | LP013 |
| HTWJ HTWK HTWL | Resting T-cell, re-excision | Lambda ZAP II | LP013 |
| HF6S | Human Whole 6 week Old Embryo (II), | pBluescript | LP013 |
| | subt | | |
| HHPS | Human Hippocampus, subtracted | pBluescript | LP013 |
| HL1S | LNCAP, differential expression | pBlueseript | LP013 |
| HLHS HLHT | Early Stage Human Lung, Subtracted | pBluescript | LP013 |
| HSUS | Supt cells, cyclohexamide treated, | pBluescript | LP013 |
| | subtracted | | |
| HSUT | Supt cells, cyclohexamide treated, | pBluescript | LP013 |
| | differentially expressed | | |
| HSDS | H. Striatum Depression, subtracted | pBluescript | LP013 |
| HPTZ | Human Pituitary, Subtracted VII | pBluescript | LP013 |
| HSDX | H. Striatum Depression, subt II | pBluescript | LP013 |
| HSDZ | H. Striatum Depression, subt | pBluescript | LP013 |
| HPBA HPBB HPBC HPBD HPBE | Human Pineal Gland | pBluescript SK- | LP013 |
| HRTA | Colorectal Tumor | pBluescript SK- | LP013 |
| HSBA HSBB HSBC HSBM | HSC172 cells | pBluescript SK- | LP013 |
| HJAA HJAB HJAC HJAD | Jurkat T-cell G1 phase | pBluescript SK- | LP013 |
| HJBA HJBB HJBC HJBD | Jurkat T-cell, S1 phase | pBluescript SK- | LP013 |
| HTNA HTNB | Human Thyroid | pBluescript SK- | LP013 |
| HAHA HAHB | Human Adult Heart | Uni-ZAP XR | LP013 |
| HE6A | Whole 6 week Old Embryo | Uni-ZAP XR | LP013 |
| HFCA HFCB HFCC HFCD HFCE | Human Fetal Brain | Uni-ZAP XR | LP013 |
| HFKC HFKD HFKE HFKF HFKG | Human Fetal Kidney | Uni-ZAP XR | LP013 |
| HGBA HGBD HGBE HGBF HGBG | Human Gall Bladder | Uni-ZAP XR | LP013 |
| HPRA HPRB HPRC HPRD | Human Prostate | Uni-ZAP XR | LP013 |
| HTEA HTEB HTEC HTED HTEE | Human Testes | Uni-ZAP XR | LP013 |
| HTTA HTTB HTTC HTTD HTTE | Human Testes Tumor | Uni-ZAP XR | LP013 |
| HYBA HYBB | Human Fetal Bone | Uni-ZAP XR | LP013 |
| HFLA | Human Fetal Liver | Uni-ZAP XR | LP013 |
| HHFB HHFC HHFD HHFE HHFF | Human Fetal Heart | Uni-ZAP XR | LP013 |
| HUVB HUVC HUVD HUVE | Human Umbilical Vein, End. remake | Uni-ZAP XR | LP013 |
| HTHB HTHC HTHD | Human Thymus | Uni-ZAP XR | LP013 |
| HSTA HSTB HSTC HSTD | Human Skin Tumor | Uni-ZAP XR | LP013 |
| HTAA HTAB HTAC HTAD HTAE | Human Activated T-cells | Uni-ZAP XR | LP013 |
| HFEA HFEB HFEC | Human Fetal Epithelium (skin) | Uni-ZAP XR | LP013 |
| HJPA HJPB HJPC HJPD | Human Jurkat Membrane Bound | Uni-ZAP XR | LP013 |
| | Polysomes | | |
| HESA | Human Epithelioid Sarcoma | Uni-ZAP XR | LP013 |
| HALS | Human Adult Liver, Subtracted | Uni-ZAP XR | LP013 |
| HFTA HFTB HFTC HFTD | Human Fetal Dura Mater | Uni-ZAP XR | LP013 |
| HCAA HCAB HCAC | Cem cells, cyclohexamide treated | Uni-ZAP XR | LP013 |
| HRGA HRGB HRGC HRGD | Raji Cells, cyclohexamide treated | Uni-ZAP XR | LP013 |
| HE9A HE9B HE9C HE9D HE9E | Nine Week Old Early Stage Human | Uni-ZAP XR | LP013 |
| HSFA | Human Fibrosarcoma | Uni-ZAP XR | LP013 |
| HATA HATB HATC HATD HATE | Human Adrenal Gland Tumor | Uni-ZAP XR | LP013 |
| HTRA | Human Trachea Tumor | Uni-ZAP XR | LP013 |
| HE2A HE2D HE2E HE2H HE2J | 12 Week Old Early Stage Human | Uni-ZAP XR | LP013 |
| HE2B HE2C HE2F HE2G HE2P | 12 Week Old Early Stage Human, II | Uni-ZAP XR | LP013 |
| HNEA HNEB HNEC HNED HNEE | Human Neutrophil | Uni-ZAP XR | LP013 |
| HBGA | Human Primary Breast Cancer | Uni-ZAP XR | LP013 |
| HPTS HPTT HPTU | Human Pituitary, subtracted | Uni-ZAP XR | LP013 |
| HMQA HMQB HMQC HMQD | Human Activated Monocytes | Uni-ZAP XR | LP013 |
| HOAA HOAB HOAC | Human Osteosarcoma | Uni-ZAP XR | LP013 |
| HTOA HTOD HTOE HTOF HTOG | human tonsils | Uni-ZAP XR | LP013 |
| HMGB | Human OB MG63 control fraction I | Uni-ZAP XR | LP013 |
| HOPB | Human OB HOS control fraction I | Uni-ZAP XR | LP013 |
| HOQB | Human OB HOS treated (1 nM E2) | Uni-ZAP XR | LP013 |
| | fraction I | | |
| HAUA HAUB HAUC | Amniotic Cells - TNF induced | Uni-ZAP XR | LP013 |
| HAQA HAQB HAQC HAQD | Amniotic Cells - Primary Culture | Uni-ZAP XR | LP013 |
| HROA HROC | HUMAN STOMACH | Uni-ZAP XR | LP013 |
| HBJA HBJB HBJC HBJD HBJE | HUMAN B CELL LYMPHOMA | Uni-ZAP XR | LP013 |
| HODA HODB HODC HODD | human ovarian cancer | Uni-ZAP XR | LP013 |
| HCPA | Corpus Callosum | Uni-ZAP XR | LP013 |
| HSOA | stomach cancer (human) | Uni-ZAP XR | LP013 |
| HERA | SKIN | Uni-ZAP XR | LP013 |
| HMDA | Brain-medulloblastoma | Uni-ZAP XR | LP013 |
| HGLA HGLB HGLD | Glioblastoma | Uni-ZAP XR | LP013 |
| HWTA HWTB HWTC | wilm's tumor | Uni-ZAP XR | LP013 |
| HEAA | H. Atrophic Endometrium | Uni-ZAP XR | LP013 |
| HAPN HAPO HAPP HAPQ HAPR | Human Adult Pulmonary;re-excision | Uni-ZAP XR | LP013 |
| HLTG HLTH | Human T-cell lymphoma;re-excision | Uni-ZAP XR | LP013 |
| HAHC HARD HAHE | Human Adult Heart;re-excision | Uni-ZAP XR | LP013 |
| HAGA HAGB HAGC HAGD HAGE | Human Amygdala | Uni-ZAP XR | LP013 |
| HSJA HSJB HSJC | Smooth muscle-ILb induced | Uni-ZAP XR | LP013 |
| HSHA HSHB HSHC | Smooth muscle, IL1b induced | Uni-ZAP XR | LP013 |
| HPWA HPWB HPWC HPWD HPWE | Prostate BPH | Uni-ZAP XR | LP013 |
| HPIA HPIB HPIC | LNCAP prostate cell line | Uni-ZAP XR | LP013 |
| HIPJA HPJB HPJC | PC3 Prostate cell line | Uni-ZAP XR | LP013 |
| HBTA | Bone Marrow Stroma, TNF&LPS ind | Uni-ZAP XR | LP013 |
| HMCF HMCG HMCH HMCI HMCJ | Macrophage-oxLDL;re-excision | Uni-ZAP XR | LP013 |
| HAGG HAGH HAGI | Human Amygdala;re-excision | Uni-ZAP XR | LP013 |
| HACA | H. Adipose Tissue | Uni-ZAP XR | LP013 |
| HKFB | K562 + PMA (36 hrs), re-excision | ZAP Express | LP013 |
| HCWT HCWU HCWV | CD34 positive cells (cord blood), re-ex | ZAP Express | LP013 |
| HBWA | Whole brain | ZAP Express | LP013 |
| HBXA HBXB HBXC HBXD | Human Whole Brain #2 - Oligo dT> | ZAP Express | LP013 |
| | 1.5 Kb | | |
| HAVM | Temporal cortex-Alzheizmer | pT-Adv | LP014 |
| HAVT | Hippocampus, Alzheimer Subtracted | pT-Adv | LP014 |
| HHAS | CHME Cell Line | Uni-ZAP XR | LP014 |
| HAJR | Larynx normal | pSport 1 | LP014 |
| HWLE HWLF HWLG HWLH | Colon Normal | pSport 1 | LP014 |
| HCRM HCRN HCRO | Colon Carcinoma | pSport 1 | LP014 |
| HWLI HWLJ HWLK | Colon Normal | pSport 1 | LP014 |
| HWLQ HWLR HWLS HWLT | Colon Tumor | pSport 1 | LP014 |
| HBFM | Gastrocnemius Muscle | pSport 1 | LP014 |
| HBOD HBOE | Quadriceps Muscle | pSport 1 | LP014 |
| HBKD HBKE | Soleus Muscle | pSport 1 | LP014 |
| HCCM | Pancreatic Langerhans | pSport 1 | LP014 |
| HWGA | Larynx carcinoma | pSport 1 | LP014 |
| HWGM HWGN | Larynx carcinoma | pSport 1 | LP014 |
| HWLA HWLB HWLC | Normal colon | pSport 1 | LP014 |
| HWLM HWLN | Colon Tumor | pSport 1 | LP014 |
| HVAM HVAN HVAO | Pancreas Tumor | pSport 1 | LP014 |
| HWGQ | Larynx carcinoma | pSport 1 | LP014 |
| HAQM HAQN | Salivary Gland | pSport 1 | LP014 |
| HASM | Stomach; normal | pSport 1 | LP014 |
| HBCM | Uterus; normal | pSport 1 | LP014 |
| HCDM | Testis, normal | pSport 1 | LP014 |
| HDJM | Brain; normal | pSport 1 | LP014 |
| HEFM | Adrenal Gland, normal | pSport 1 | LP014 |
| HBAA | Rectum normal | pSport 1 | LP014 |
| HFDM | Rectum tumour | pSport 1 | LP014 |
| HGAM | Colon, normal | pSport 1 | LP014 |
| HHMM | Colon, tumour | pSport 1 | LP014 |
| HCLB HCLC | Human Lung Cancer | Lambda Zap II | LP015 |
| HRLA | L1 Cell line | ZAP Express | LP015 |
| HHAM | Hypothalamus, Alzheimer's | pCMVSport 3.0 | LP015 |
| HKBA | Ku 812F Basophils Line | pSport 1 | LP015 |
| HS2S | Saos2, Dexamethosome Treated | pSport 1 | LP016 |
| HA5A | Lung Carcinoma A549 TNFalpha | pSport 1 | LP016 |
| | activated | | |
| HTFM | TF-1 Cell Line GM-CSF Treated | pSport 1 | LP016 |
| HYAS | Thyroid Tumour | pSport 1 | LP016 |
| HUTS | Larynx Normal | pSport 1 | LP016 |
| HXOA | Larynx Tumor | pSport 1 | LP016 |
| HEAH | Ea.hy.926 cell line | pSport 1 | LP016 |
| HINA | Adenocarcinoma Human | pSport 1 | LP016 |
| HRMA | Lung Mesothelium | pSport 1 | LP016 |
| HLCL | Human Pre-Differentiated Adipocytes | Uni-Zap XR | LP017 |
| HS2A | Saos2 Cells | pSport 1 | LP020 |
| HS2I | Saos2 Cells; Vitamin D3 Treated | pSport 1 | LP020 |
| HUCM | CHME Cell Line, untreated | pSport 1 | LP020 |
| HEPN | Aryepiglottis Normal | pSport 1 | LP020 |
| HPSN | Sinus Piniformis Tumour | pSport 1 | LP020 |
| HNSA | Stomach Normal | pSport 1 | LP020 |
| HNSM | Stomach Tumour | pSport 1 | LP020 |
| HNLA | Liver Normal Met5No | pSport 1 | LP020 |
| HUTA | Liver Tumour Met 5 Tu | pSport 1 | LP020 |
| HOCN | Colon Normal | pSport 1 | LP020 |
| HOCT | Colon Tumor | pSport 1 | LP020 |
| HTNT | Tongue Tumour | pSport 1 | LP020 |
| HLXN | Larynx Normal | pSport 1 | LP020 |
| HLXT | Larynx Tumour | pSport 1 | LP020 |
| HTYN | Thymus | pSport 1 | LP020 |
| HPLN | Placenta | pSport 1 | LP020 |
| HTNG | Tongue Normal | pSport 1 | LP020 |
| HZAA | Thyroid Normal (SDCA2 No) | pSport 1 | LP020 |
| HWES | Thyroid Thyroiditis | pSport 1 | LP020 |
| HFHD | Ficolled Human Stromal Cells, 5Fu | pTrip1Ex2 | LP021 |
| | treated | | |
| HFHM, HFHN | Ficolled Human Stromal Cells, | pTrip1Ex2 | LP021 |
| | Untreated | | |
| HPCI | Hep G2 Cells, lambda library | lambda Zap-CMV XR | LP021 |
| HBCA, HBCB, HBCC | H. Lymph node breast Cancer | Uni-ZAP XR | LP021 |
| HCOK | Chondrocytes | pSPORT1 | LP022 |
| HDCA, HDCB, HDCC | Dendritic Cells From CD34 Cells | pSPORT1 | LP022 |
| HDMA, HDMB | CD40 activated monocyte dendritic | pSPORT1 | LP022 |
| | cells | | |
| HDDM, HDDN, HDDO | LPS activated derived dendritic cells | pSPORT1 | LP022 |
| HPCR | Hep G2 Cells, PCR library | lambda Zap-CMV XR | LP022 |
| HAAA, HAAB, HAAC | Lung, Cancer (4005313A3): Invasive | pSPORT1 | LP022 |
| | Poorly Differentiated Lung | | |
| | Adenocarcinoma | | |
| HIPA HIPB HIPC | Lung, Cancer (4005163 B7): Invasive, | pSPORT1 | LP022 |
| | Poorly Diff. Adenocarcinoma, | | |
| | Metastatic | | |
| HOOH, HOOI | Ovary, Cancer: (4004562 B6) Papillary | pSPORT1 | LP022 |
| | Serous Cystic Neoplasm, Low | | |
| | Malignant Pot | | |
| HIDA | Lung, Normal. (4005313 B1) | pSPORT1 | LP022 |
| HUJA, HUJB, HUJC, HUJD, HUJE | B-Cells | pCMVSport 3.0 | LP022 |
| HNOA, HNOB, HNOC, HNOD | Ovary, Normal: (9805C040R) | pSPORT1 | LP022 |
| HNLM | Lung, Normal: (4005313 B1) | pSPORT1 | LP022 |
| HSCL | Stromal Cells | pSPORT1 | LP022 |
| HAAX | Lung, Cancer: (4005313 A3) Invasive | pSPORT1 | LP022 |
| | Poorly-differentiated Metastatic lung | | |
| | adenocarcinoma | | |
| HUUA, HUUB, HUUC, HUUD | B-cells (unstimulated) | pTrip1Ex2 | LP022 |
| HWWA, HWWB, HWWC, HWWD, | B-cells (stimulated) | pSPORT1 | LP022 |
| HWWE, HWWF, HWWG | | | |
| HCCC | Colon, Cancer: (9808C064R) | pCMVSport 3.0 | LP023 |
| HPDO HPDP HPDQ HPDR HPD | Ovary, Cancer (9809C332): Poorly | pSport 1 | LP023 |
| | differentiated adenocarcinoma | | |
| HPCO HPCP HPCQ HPCT | Ovary, Cancer (15395A1F): Grade II | pSport 1 | LP023 |
| | Papillary Carcinoma | | |
| HOCM HOCO HOCP HOCQ | Ovary, Cancer: (15799A1F) Poorly | pSport 1 | LP023 |
| | differentiated carcinoma | | |
| HCBM HCBN HCBO | Breast, Cancer: (4004943 A5) | pSport 1 | LP023 |
| HNBT HNBU HNBV | Breast, Normal: (4005522B2) | pSport 1 | LP023 |
| HBCP HBCQ | Breast, Cancer: (4005522 A2) | pSport 1 | LP023 |
| HBCJ | Breast, Cancer: (9806C012R) | pSport 1 | LP023 |
| HSAM HSAN | Stromal cells 3.88 | pSport 1 | LP023 |
| HVCA HVCB HVCC HVCD | Ovary, Cancer: (4004332 A2) | pSport 1 | LP023 |
| HSCK HSEN HSEO | Stromal cells (HBM3.18) | pSport 1 | LP023 |
| HSCP HSCQ | stromal cell clone 2.5 | pSport 1 | LP023 |
| HUXA | Breast Cancer: (4005385 A2) | pSport 1 | LP023 |
| HCOM HCON HCOO HCOP HCOQ | Ovary, Cancer (4004650 A3): Well- | pSport 1 | LP023 |
| | Differentiated Micropapillary Serous | | |
| | Carcinoma | | |
| HBNM | Breast, Cancer: (9802C020E) | pSport 1 | LP023 |
| HVVA HVVB HVVC HVVD HVVE | Human Bone Marrow, treated | pSport 1 | LP023 |

[0879] Two nonlimiting examples are provided below for isolating a particular clone from the deposited sample of plasmid cDNAs cited for that clone in Table 7. First, a plasmid is directly isolated by screening the clones using a polynucleotide probe corresponding to the nucleotide sequence of SEQ ID NO:X.

[0880] Particularly, a specific polynucleotide with 30-40 nucleotides is synthesized using an Applied Biosystems DNA synthesizer according to the sequence reported. The oligonucleotide is labeled, for instance, with ³²P-γ-ATP using T4 polynucleotide kinase and purified according to routine methods. (E.g., Maniatis et al., Molecular Cloning: A Laboratory Manual, Cold Spring Harbor Press, Cold Spring, NY (1982)). The plasmid mixture is transformed into a suitable host, as indicated above (such as XL-1 Blue (Stratagene)) using techniques known to those of skill in the art, such as those provided by the vector supplier or in related publications or patents cited above. The transformants are plated on 1.5% agar plates (containing the appropriate selection agent, e.g., ampicillin) to a density of about 150 transformants (colonies) per plate. These plates are screened using Nylon membranes according to routine methods for bacterial colony screening (e.g., Sambrook et al., Molecular Cloning: A Laboratory Manual, 2nd Edit., (1989), Cold Spring Harbor Laboratory Press, pages 1.93 to 1.104), or other techniques known to those of skill in the art.

[0881] Alternatively, two primers of 17-20 nucleotides derived from both ends of the nucleotide sequence of SEQ ID NO:X are synthesized and used to amplify the desired cDNA using the deposited cDNA plasmid as a template. The polymerase chain reaction is carried out under routine conditions, for instance, in 25 μl of reaction mixture with 0.5 ug of the above cDNA template. A convenient reaction mixture is 1.5-5 mM MgCl₂, 0.01% (w/v) gelatin, 20 μM each of dATP, dCTP, dGTP, dTTP, 25 pmol of each primer and 0.25 Unit of Taq polymerase. Thirty five cycles of PCR (denaturation at 94° C. for 1 min; annealing at 55° C. for 1 min; elongation at 72° C. for 1 min) are performed with a Perkin-Elmer Cetus automated thermal cycler. The amplified product is analyzed by agarose gel electrophoresis and the DNA band with expected molecular weight is excised and purified. The PCR product is verified to be the selected sequence by subcloning and sequencing the DNA product.

[0882] Several methods are available for the identification of the 5′ or 3′ non-coding portions of a gene which may not be present in the deposited clone. These methods include but are not limited to, filter probing, clone enrichment using specific probes, and protocols similar or identical to 5′ and 3′ “RACE” protocols which are well known in the art. For instance, a method similar to 5′ RACE is available for generating the missing 5′ end of a desired full-length transcript. (Fromont-Racine et al., Nucleic Acids Res. 21(7):1683-1684 (1993)).

[0883] Briefly, a specific RNA oligonucleotide is ligated to the 5′ ends of a population of RNA presumably containing full-length gene RNA transcripts. A primer set containing a primer specific to the ligated RNA oligonucleotide and a primer specific to a known sequence of the gene of interest is used to PCR amplify the 5′ portion of the desired full-length gene. This amplified product may then be sequenced and used to generate the full length gene.

[0884] This above method starts with total RNA isolated from the desired source, although poly-A+ RNA can be used. The RNA preparation can then be treated with phosphatase if necessary to eliminate 5′ phosphate groups on degraded or damaged RNA which may interfere with the later RNA ligase step. The phosphatase should then be inactivated and the RNA treated with tobacco acid pyrophosphatase in order to remove the cap structure present at the 5′ ends of messenger RNAs. This reaction leaves a 5′ phosphate group at the 5′ end of the cap cleaved RNA which can then be ligated to an RNA oligonucleotide using T4 RNA ligase.

[0885] This modified RNA preparation is used as a template for first strand cDNA synthesis using a gene specific oligonucleotide. The first strand synthesis reaction is used as a template for PCR amplification of the desired 5′ end using a primer specific to the ligated RNA oligonucleotide and a primer specific to the known sequence of the gene of interest. The resultant product is then sequenced and analyzed to confirm that the 5′ end sequence belongs to the desired gene.

### Example 2

### Isolation of Genomic Clones Corresponding to a Polynucleotide

[0886] A human genomic P1 library (Genomic Systems, Inc.) is screened by PCR using primers selected for the sequence corresponding to SEQ ID NO:X according to the method described in Example 1. (See also, Sambrook.)

### Example 3

### Tissue Specific Expression Analysis

[0887] The Human Genome Sciences, Inc. (HGS) database is derived from sequencing tissue and/or disease specific cDNA libraries. Libraries generated from a particular tissue are selected and the specific tissue expression pattern of EST groups or assembled contigs within these libraries is determined by comparison of the expression patterns of those groups or contigs within the entire database. ESTs and assembled contigs which show tissue specific expression are selected.

[0888] The original clone from which the specific EST sequence was generated, or in the case of an assembled contig, the clone from which the 5′ most EST sequence was generated, is obtained from the catalogued library of clones and the insert amplified by PCR using methods known in the art. The PCR product is denatured and then transferred in 96 or 384 well format to a nylon membrane (Schleicher and Scheull) generating an array filter of tissue specific clones. Housekeeping genes, maize genes, and known tissue specific genes are included on the filters. These targets can be used in signal normalization and to validate assay sensitivity. Additional targets are included to monitor probe length and specificity of hybridization.

[0889] Radioactively labeled hybridization probes are generated by first strand eDNA synthesis per the manufacturer's instructions (Life Technologies) from mRNA/RNA samples prepared from the specific tissue being analyzed (e.g., prostate, prostate cancer, ovarian, ovarian cancer, etc.). The hybridization probes are purified by gel exclusion chromatography, quantitated, and hybridized with the array filters in hybridization bottles at 65° C. overnight. The filters are washed under stringent conditions and signals are captured using a Fuji phosphorimager.

[0890] Data is extracted using AIS software and following background subtraction, signal normalization is performed. This includes a normalization of filter-wide expression levels between different experimental runs. Genes that are differentially expressed in the tissue of interest are identified.

### Example 4

### Chromosomal Mapping of the Polynucleotides

[0891] An oligonucleotide primer set is designed according to the sequence at the 5′ end of SEQ ID NO:X. This primer preferably spans about 100 nucleotides. This primer set is then used in a polymerase chain reaction under the following set of conditions: 30 seconds, 95° C.; 1 minute, 56° C.; 1 minute, 70° C. This cycle is repeated 32 times followed by one 5 minute cycle at 70° C. Human, mouse, and hamster DNA is used as template in addition to a somatic cell hybrid panel containing individual chromosomes or chromosome fragments (Bios, Inc). The reactions are analyzed on either 8% polyacrylamide gels or 3.5 % agarose gels. Chromosome mapping is determined by the presence of an approximately 100 bp PCR fragment in the particular somatic cell hybrid.

### Example 5

### Bacterial Expression of a Polypeptide

[0892] A polynucleotide encoding a polypeptide of the present invention is amplified using PCR oligonucleotide primers corresponding to the 5′ and 3′ ends of the DNA sequence, as outlined in Example 1, to synthesize insertion fragments. The primers used to amplify the CDNA insert should preferably contain restriction sites, such as BamHI and XbaI, at the 5′ end of the primers in order to clone the amplified product into the expression vector. For example, BamHI and XbaI correspond to the restriction enzyme sites on the bacterial expression vector pQE-9. (Qiagen, Inc., Chatsworth, Calif.). This plasmid vector encodes antibiotic resistance (Ampr), a bacterial origin of replication (ori), an IPTG-regulatable promoter/operator (P/O), a ribosome binding site (RBS), a 6-histidine tag (6-His), and restriction enzyme cloning sites.

[0893] The pQE-9 vector is digested with BamHI and XbaI and the amplified fragment is ligated into the pQE-9 vector maintaining the reading frame initiated at the bacterial RBS. The ligation mixture is then used to transform the E. coli strain M15/rep4 (Qiagen, Inc.) which contains multiple copies of the plasmid pREP4, which expresses the laci repressor and also confers kanamycin resistance (Kan^{r}). Transformants are identified by their ability to grow on LB plates and ampicillin/kanamycin resistant colonies are selected. Plasmid DNA is isolated and confirmed by restriction analysis.

[0894] Clones containing the desired constructs are grown overnight (O/N) in liquid culture in LB media supplemented with both Amp (100 ug/ml) and Kan (25 ug/ml). The O/N culture is used to inoculate a large culture at a ratio of 1:100 to 1:250. The cells are grown to an optical density 600 (O.D.⁶⁰⁰) of between 0.4 and 0.6. IPTG (Isopropyl-B-D-thiogalacto pyranoside) is then added to a final concentration of 1 mM. IPTG induces by inactivating the lacI repressor, clearing the P/O leading to increased gene expression.

[0895] Cells are grown for an extra 3 to 4 hours. Cells are then harvested by centrifugation (20 mins at 6000× g). The cell pellet is solubilized in the chaotropic agent 6 Molar Guanidine HCl by stirring for 3-4 hours at 4° C. The cell debris is removed by centrifugation, and the supernatant containing the polypeptide is loaded onto a nickel-nitrilo-tri-acetic acid (“Ni-NTA”) affinity resin column (available from QIAGEN, Inc., supra). Proteins with a 6× His tag bind to the Ni-NTA resin with high affinity and can be purified in a simple one-step procedure (for details see: The QlAexpressionist (1995) QIAGEN, Inc., supra).

[0896] Briefly, the supernatant is loaded onto the column in 6 M guanidine-HCl, pH 8. The column is first washed with 10 volumes of 6 M guanidine-HCl, pH 8, then washed with 10 volumes of 6 M guanidine-HCl pH 6, and finally the polypeptide is eluted with 6 M guanidine-HCl, pH 5.

[0897] The purified protein is then renatured by dialyzing it against phosphate-buffered saline (PBS) or 50 mM Na-acetate, pH 6 buffer plus 200 mM NaCl. Alternatively, the protein can be successfully refolded while immobilized on the Ni-NTA column. The recommended conditions are as follows: renature using a linear 6M-1M urea gradient in 500 mM NaCl, 20% glycerol, 20 mM Tris/HCl pH 7.4, containing protease inhibitors. The renaturation should be performed over a period of 1.5 hours or more. After renaturation the proteins are eluted by the addition of 250 mM immidazole. Immidazole is removed by a final dialyzing step against PBS or 50 mM sodium acetate pH 6 buffer plus 200 mM NaCl. The purified protein is stored at 4° C. or frozen at −80° C.

[0898] In addition to the above expression vector, the present invention further includes an expression vector, called pHE4a (ATCC Accession Number 209645, deposited on Feb. 25, 1998) which contains phage operator and promoter elements operatively linked to a polynucleotide of the present invention, called pHE4a. (ATCC Accession Number 209645, deposited on Feb. 25, 1998.) This vector contains: 1) a neomycinphosphotransferase gene as a selection marker, 2) an E. coli origin of replication, 3) a T5 phage promoter sequence, 4) two lac operator sequences, 5) a Shine-Delgarno sequence, and 6) the lactose operon repressor gene (lacIq). The origin of replication (oriC) is derived from pUC19 (LTI, Gaithersburg, Md.). The promoter and operator sequences are made synthetically.

[0899] DNA can be inserted into the pHE4a by restricting the vector with NdeI and XbaI, BamHI, XhoI, or Asp718, running the restricted product on a gel, and isolating the larger fragment (the stuffer fragment should be about 310 base pairs). The DNA insert is generated according to the PCR protocol described in Example 1, using PCR primers having restriction sites for NdeI (5′ primer) and XbaI, BamHI, XhoI, or Asp718 (3′ primer). The PCR insert is gel purified and restricted with compatible enzymes. The insert and vector are ligated according to standard protocols.

[0900] The engineered vector could easily be substituted in the above protocol to express protein in a bacterial system.

### Example 6

### Purification of a Polypeptide from an Inclusion Body

[0901] The following alternative method can be used to purify a polypeptide expressed in E coli when it is present in the form of inclusion bodies. Unless otherwise specified, all of the following steps are conducted at 4-10° C.

[0902] Upon completion of the production phase of the E. coli fermentation, the cell culture is cooled to 4-10° C. and the cells harvested by continuous centrifugation at 15,000 rpm (Heraeus Sepatech). On the basis of the expected yield of protein per unit weight of cell paste and the amount of purified protein required, an appropriate amount of cell paste, by weight, is suspended in a buffer solution containing 100 mM Tris, 50 mM EDTA, pH 7.4. The cells are dispersed to a homogeneous suspension using a high shear mixer.

[0903] The cells are then lysed by passing the solution through a microfluidizer (Microfuidics, Corp. or APV Gaulin, Inc.) twice at 4000-6000 psi. The homogenate is then mixed with NaCl solution to a final concentration of 0.5 M NaCl, followed by centrifugation at 7000× g for 15 min. The resultant pellet is washed again using 0.5M NaCl, 100 mM Tris, 50 mM EDTA, pH 7.4.

[0904] The resulting washed inclusion bodies are solubilized with 1.5 M guanidine hydrochloride (GUHCI) for 2-4 hours. After 7000× g centrifugation for 15 min., the pellet is discarded and the polypeptide containing supernatant is incubated at 4° C. overnight to allow further GuHCI extraction.

[0905] Following high speed centrifugation (30,000 xg) to remove insoluble particles, the GuHCl solubilized protein is refolded by quickly mixing the GuHCl extract with 20 volumes of buffer containing 50 mM sodium, pH 4.5, 150 mM NaCl, 2 mM EDTA by vigorous stirring. The refolded diluted protein solution is kept at 4° C. without mixing for 12 hours prior to further purification steps.

[0906] To clarify the refolded polypeptide solution, a previously prepared tangential filtration unit equipped with 0.16 μm membrane filter with appropriate surface area (e.g., Filtron), equilibrated with 40 mM sodium acetate, pH 6.0 is employed. The filtered sample is loaded onto a cation exchange resin (e.g., Poros HS-50, Perseptive Biosystems). The column is washed with 40 mM sodium acetate, pH 6.0 and eluted with 250 mM, 500 mM, 1000 mM, and 1500 mM NaCl in the same buffer, in a stepwise manner. The absorbance at 280 nm of the effluent is continuously monitored. Fractions are collected and further analyzed by SDS-PAGE.

[0907] Fractions containing the polypeptide are then pooled and mixed with 4 volumes of water. The diluted sample is then loaded onto a previously prepared set of tandem columns of strong anion (Poros HQ-50, Perseptive Biosystems) and weak anion (Poros CM-20, Perseptive Biosystems) exchange resins. The columns are equilibrated with 40 mM sodium acetate, pH 6.0. Both columns are washed with 40 mM sodium acetate, pH 6.0, 200 mM NaCl. The CM-20 column is then eluted using a 10 column volume linear gradient ranging from 0.2 M NaCl, 50 mM sodium acetate, pH 6.0 to 1.0 M NaCl, 50 mM sodium acetate, pH 6.5. Fractions are collected under constant A₂₈₀ monitoring of the effluent. Fractions containing the polypeptide (determined, for instance, by 16% SDS-PAGE) are then pooled.

[0908] The resultant polypeptide should exhibit greater than 95% purity after the above refolding and purification steps. No major contaminant bands should be observed from Commassie blue stained 16% SDS-PAGE gel when 5 μg of purified protein is loaded. The purified protein can also be tested for endotoxin/LPS contamination, and typically the LPS content is less than 0.1 ng/ml according to LAL assays.

### Example 7

### Cloning and Expression of a Polypeptide in a Baculovirus Expression System

[0909] In this example, the plasmid shuttle vector pA2 is used to insert a polynucleotide into a baculovirus to express a polypeptide. This expression vector contains the strong polyhedrin promoter of the Autographa californica nuclear polyhedrosis virus (AcMNPV) followed by convenient restriction sites such as BamHI, Xba I and Asp7l8. The polyadenylation site of the simian virus 40 (“SV40”) is used for efficient polyadenylation. For easy selection of recombinant virus, the plasmid contains the beta-galactosidase gene from E. coli under control of a weak Drosophila promoter in the same orientation, followed by the polyadenylation signal of the polyhedrin gene. The inserted genes are flanked on both sides by viral sequences for cell-mediated homologous recombination with wild-type viral DNA to generate a viable virus that express the cloned polynucleotide.

[0910] Many other baculovirus vectors can be used in place of the vector above, such as pAc373, pVL941, and pAcIM1, as one skilled in the art would readily appreciate, as long as the construct provides appropriately located signals for transcription, translation, secretion and the like, including a signal peptide and an in-frame AUG as required. Such vectors are described, for instance, in Luckow et al., Virology 170:31-39 (1989).

[0911] Specifically, the cDNA sequence contained in the deposited clone, including the AUG initiation codon, is amplified using the PCR protocol described in Example 1. If a naturally occurring signal sequence is used to produce the polypeptide of the present invention, the pA2 vector does not need a second signal peptide. Alternatively, the vector can be modified (pA2 GP) to include a baculovirus leader sequence, using the standard methods described in Summers et al., “A Manual of Methods for Baculovirus Vectors and Insect Cell Culture Procedures,” Texas Agricultural Experimental Station Bulletin No. 1555 (1987).

[0912] The amplified fragment is isolated from a 1% agarose gel using a commercially available kit (“Geneclean,” BIO 101 Inc., La Jolla, Calif.). The fragment then is digested with appropriate restriction enzymes and again purified on a 1% agarose gel.

[0913] The plasmid is digested with the corresponding restriction enzymes and optionally, can be dephosphorylated using calf intestinal phosphatase, using routine procedures known in the art. The DNA is then isolated from a 1% agarose gel using a commercially available kit (“Geneclean” BIO 101 Inc., La Jolla, Calif.).

[0914] The fragment and the dephosphorylated plasmid are ligated together with T4 DNA ligase. E. coli HB101 or other suitable E. coli hosts such as XL-1 Blue (Stratagene Cloning Systems, La Jolla, Calif.) cells are transformed with the ligation mixture and spread on culture plates. Bacteria containing the plasmid are identified by digesting DNA from individual colonies and analyzing the digestion product by gel electrophoresis. The sequence of the cloned fragment is confirmed by DNA sequencing.

[0915] Five μg of a plasmid containing the polynucleotide is co-transfected with 1.0 μg of a commercially available linearized baculovirus DNA (“BaculoGoldTm baculovirus DNA, Pharmingen, San Diego, Calif.), using the lipofection method described by Felgner et al., Proc. Natl. Acad. Sci. USA 84:7413-7417 (1987). One μg of BaculoGoldTM virus DNA and 5 μg of the plasmid are mixed in a sterile well of a microtiter plate containing 50 μl of serum-free Grace's medium (Life Technologies Inc., Gaithersburg, Md.). Afterwards, 10 μl Lipofectin plus 90 μl Grace's medium are added, mixed and incubated for 15 minutes at room temperature. Then the transfection mixture is added drop-wise to Sf9 insect cells (ATCC CRL 1711) seeded in a 35 mm tissue culture plate with 1 ml Grace's medium without serum. The plate is then incubated for 5 hours at 27° C. The transfection solution is then removed from the plate and 1 ml of Grace's insect medium supplemented with 10% fetal calf serum is added. Cultivation is then continued at 27° C. for four days.

[0916] After four days the supernatant is collected and a plaque assay is performed, as described by Summers and Smith, supra. An agarose gel with “Blue Gal” (Life Technologies Inc., Gaithersburg) is used to allow easy identification and isolation of gal-expressing clones, which produce blue-stained plaques. (A detailed description of a “plaque assay” of this type can also be found in the user's guide for insect cell culture and baculovirology distributed by Life Technologies Inc., Gaithersburg, page 9-10.) After appropriate incubation, blue stained plaques are picked with the tip of a micropipettor (e.g., Eppendorf). The agar containing the recombinant viruses is then resuspended in a microcentrifuge tube containing 200 μl of Grace's medium and the suspension containing the recombinant baculovirus is used to infect Sf9 cells seeded in 35 mm dishes. Four days later the supernatants of these culture dishes are harvested and then they are stored at 4° C.

[0917] To verify the expression of the polypeptide, Sf9 cells are grown in Grace's medium supplemented with 10% heat-inactivated FBS. The cells are infected with the recombinant baculovirus containing the polynucleotide at a multiplicity of infection (“MOI”) of about 2. If radiolabeled proteins are desired, 6 hours later the medium is removed and is replaced with SF900 II medium minus methionine and cysteine (available from Life Technologies Inc., Rockville, Md.). After 42 hours, 5 μCi of ³⁵S-methionine and 5 μCi ³⁵S-cysteine (available from Amersham) are added. The cells are further incubated for 16 hours and then are harvested by centrifugation. The proteins in the supernatant as well as the intracellular proteins are analyzed by SDS-PAGE followed by autoradiography (if radiolabeled).

[0918] Microsequencing of the amino acid sequence of the amino terminus of purified protein may be used to determine the amino terminal sequence of the produced protein.

### Example 8

### Expression of a Polypeptide in Mammalian Cells

[0919] The polypeptide of the present invention can be expressed in a mammalian cell. A typical mammalian expression vector contains a promoter element, which mediates the initiation of transcription of mRNA, a protein coding sequence, and signals required for the termination of transcription and polyadenylation of the transcript. Additional elements include enhancers, Kozak sequences and intervening sequences flanked by donor and acceptor sites for RNA splicing. Highly efficient transcription is achieved with the early and late promoters from SV40, the long terminal repeats (LTRs) from Retroviruses, e.g., RSV, HTLVI, HIVI and the early promoter of the cytomegalovirus (CMV). However, cellular elements can also be used (e.g., the human actin promoter).

[0920] Suitable expression vectors for use in practicing the present invention include, for example, vectors such as pSVL and pMSG (Pharmacia, Uppsala, Sweden), pRSVcat (ATCC 37152), pSV2dhfr (ATCC 37146), pBC12MI (ATCC 67109), pCMVSport 2.0, and pCMVSport 3.0. Mammalian host cells that could be used include, human Hela, 293, H9 and Jurkat cells, mouse NIH3T3 and C127 cells, Cos 1, Cos 7 and CVI, quail QC1-3 cells, mouse L cells and Chinese hamster ovary (CHO) cells.

[0921] Alternatively, the polypeptide can be expressed in stable cell lines containing the polynucleotide integrated into a chromosome. The co-transfection with a selectable marker such as DHFR, gpt, neomycin, or hygromycin allows the identification and isolation of the transfected cells.

[0922] The transfected gene can also be amplified to express large amounts of the encoded protein. The DHFR (dihydrofolate reductase) marker is useful in developing cell lines that carry several hundred or even several thousand copies of the gene of interest. (See, e.g., Alt, F. W., et al., J. Biol. Chem. 253:1357-1370 (1978); Hamlin, J. L. and Ma, C., Biochem. et Biophys. Acta, 1097:107-143 (1990); Page, M. J. and Sydenham, M. A., Biotechnology 9:64-68 (1991)). Another useful selection marker is the enzyme glutamine synthase (GS) (Murphy et al., Biochem J. 227:277-279 (1991); Bebbington et al., Bio/Technology 10:169-175 (1992). Using these markers, the mammalian cells are grown in selective medium and the cells with the highest resistance are selected. These cell lines contain the amplified gene(s) integrated into a chromosome. Chinese hamster ovary (CHO) and NSO cells are often used for the production of proteins.

[0923] Derivatives of the plasmid pSV2-dhfr (ATCC Accession No. 37146), the expression vectors pC4 (ATCC Accession No. 209646) and pC6 (ATCC Accession No.209647) contain the strong promoter (LTR) of the Rous Sarcoma Virus (Cullen et al., Molecular and Cellular Biology, 438-447 (March, 1985)) plus a fragment of the CMV-enhancer (Boshart et al., Cell 41:521-530 (1985)). Multiple cloning sites, e.g., with the restriction enzyme cleavage sites BamHI, XbaI and Asp718, facilitate the cloning of the gene of interest. The vectors also contain the 3′ intron, the polyadenylation and termination signal of the rat preproinsulin gene, and the mouse DHFR gene under control of the SV40 early promoter.

[0924] Specifically, the plasmid pC6, for example, is digested with appropriate restriction enzymes and then dephosphorylated using calf intestinal phosphates by procedures known in the art. The vector is then isolated from a 1% agarose gel.

[0925] A polynucleotide of the present invention is amplified according to the protocol outlined in Example 1. If a naturally occurring signal sequence is used to produce the polypeptide of the present invention, the vector does not need a second signal peptide. Alternatively, if a naturally occurring signal sequence is not used, the vector can be modified to include a heterologous signal sequence. (See, e.g., International Publication No. WO 96/34891.)

[0926] The amplified fragment is isolated from a 1% agarose gel using a commercially available kit (“Geneclean,” BIO 101 Inc., La Jolla, Calif.). The fragment then is digested with appropriate restriction enzymes and again purified on a 1% agarose gel.

[0927] The amplified fragment is then digested with the same restriction enzyme and purified on a 1% agarose gel. The isolated fragment and the dephosphorylated vector are then ligated with T4 DNA ligase. E. Coli HB101 or XL-1 Blue cells are then transformed and bacteria are identified that contain the fragment inserted into plasmid pC6 using, for instance, restriction enzyme analysis.

[0928] Chinese hamster ovary cells lacking an active DHFR gene is used for transfection. Five μg of the expression plasmid pC6 or pC4 is cotransfected with 0.5 μg of the plasmid pSVneo using lipofectin (Felgner et al., supra). The plasmid pSV2-neo contains a dominant selectable marker, the neo gene from Tn5 encoding an enzyme that confers resistance to a group of antibiotics including G418. The cells are seeded in alpha minus MEM supplemented with 1 mg/ml G418. After 2 days, the cells are trypsinized and seeded in hybridoma cloning plates (Greiner, Germany) in alpha minus MEM supplemented with 10, 25, or 50 ng/ml of methotrexate plus 1 mg/ml G418. After about 10-14 days single clones are trypsinized and then seeded in 6-well petri dishes or 10 ml flasks using different concentrations of methotrexate (50 nM, 100 nM, 200 nM, 400 nM, 800 nM). Clones growing at the highest concentrations of methotrexate are then transferred to new 6-well plates containing even higher concentrations of methotrexate (1 μM, 2 μM, 5 μM, 10 mM, 20 mM). The same procedure is repeated until clones are obtained which grow at a concentration of 100 -200 μM. Expression of the desired gene product is analyzed, for instance, by SDS-PAGE and Western blot or by reversed phase HPLC analysis.

### Example 9

### Protein Fusions

[0929] The polypeptides of the present invention are preferably fused to other proteins. These fusion proteins can be used for a variety of applications. For example, fusion of the present polypeptides to His-tag, HA-tag, protein A, IgG domains, and maltose binding protein facilitates purification. (See Example 5; see also EP A 394,827; Traunecker, et al., Nature 331:84-86 (1988)). Similarly, fusion to IgG-l, IgG-3, and albumin increases the halflife time in vivo. Nuclear localization signals fused to the polypeptides of the present invention can target the protein to a specific subcellular localization, while covalent heterodimer or homodimers can increase or decrease the activity of a fusion protein. Fusion proteins can also create chimeric molecules having more than one function. Finally, fusion proteins can increase solubility and/or stability of the fused protein compared to the non-fused protein. All of the types of fusion proteins described above can be made by modifying 'the following protocol, which outlines the fusion of a polypeptide to an IgG molecule, or the protocol described in Example 5.

[0930] Briefly, the human Fc portion of the IgG molecule can be PCR amplified, using primers that span the 5′ and 3′ ends of the sequence described below. These primers also should have convenient restriction enzyme sites that will facilitate cloning into an expression vector, preferably a mammalian expression vector.

[0931] For example, if pC4 (ATCC Accession No. 209646) is used, the human Fc portion can be ligated into the BamHI cloning site. Note that the 3′ BamHI site should be destroyed. Next, the vector containing the human Fc portion is re-restricted with BamHI, linearizing the vector, and a polynucleotide of the present invention, isolated by the PCR protocol described in Example 1, is ligated into this BamHI site. Note that the polynucleotide is cloned without a stop codon, otherwise a fusion protein will not be produced.

[0932] If the naturally occurring signal sequence is used to produce the polypeptide of the present invention, pC4 does not need a second signal peptide. Alternatively, if the naturally occurring signal sequence is not used, the vector can be modified to include a heterologous signal sequence. (See, e.g., International Publication No. WO 96/34891.)

[0933] Human IgG Fc Region:

| | |
|---|---|
| GGGATCCGGAGCCCAAATCTTCTGACAAAACTCACACATGCCCACCGTGCCCA | (SEQ ID NO: 1) |
| GCACCTGAATTCGAGGGTGCACCGTCAGTCTTCCTCTTCCCCCCAAAACCCAAG | |
| GACACCCTCATGATCTCCCGGACTCCTGAGGTCACATGCGTGGTGGTGGACGTA | |
| AGCCACGAAGACCCTGAGGTCAAGTTCAACTGGTACGTGGACGGCGTGGAGGT | |
| GCATAATGCCAAGACAAAGCCGCGGGAGGAGCAGTACAACAGCACGTACCGTG | |
| TGGTCAGCGTCCTCACCGTCCTGCACCAGGACTGGCTGAATGGCAAGGAGTAC | |
| AAGTGCAAGGTCTCCAACAAAGCCCTCCCAACCCCCATCGAGAAAACCATCTC | |
| CAAAGCCAAAGGGCAGCCCCGAGAACCACAGGTGTACACCCTGCCCCCATCCC | |
| GGGATGAGCTGACCAAGAACCAGGTCAGCCTGACCTGCCTGGTCAAAGGCTTC | |
| TATCCAAGCGACATCGCCGTGGAGTGGGAGAGCAATGGGCAGCCGGAGAACAA | |
| CTACAAGACCACGCCTCCCGTGCTGGACTCCGACGGCTCCTTCTTCCTCTACAG | |
| CAAGCTCACCGTGGACAAGAGCAGGTGGCAGCAGGGGAACGTCTTCTCATGCT | |
| CCGTGATGCATGAGGCTCTGCACAACCACTACACGCAGAAGAGCCTCTCCCTGT | |
| CTCCGGGTAAATGAGTGCGACGGCCGCGACTCTAGAGGAT | |

### Example 10

### Production of an Antibody from a Polypeptide

[0934] a) Hybridoma Technology

[0935] The antibodies of the present invention can be prepared by a variety of methods. (See, Current Protocols, Chapter 2.) As one example of such methods, cells expressing a polypeptide of the present invention are administered to an animal to induce the production of sera containing polyclonal antibodies. In a preferred method, a preparation of a a polypeptide of the present invention is prepared and purified to render it substantially free of natural contaminants. Such a preparation is then introduced into an animal in order to produce polyclonal antisera of greater specific activity.

[0936] Monoclonal antibodies specific for a polypeptide of the present invention are prepared using hybridoma technology (Kohler et al., Nature 256:495 (1975); Kohler et al:, Eur. J. Immunol. 6:511 (1976); Kohler et al., Eur. J. Immunol. 6:292 (1976); Hammerling et al., in: Monoclonal Antibodies and T-Cell Hybridomas, Elsevier, N.Y., pp. 563-681 (1981)). In general, an animal (preferably a mouse) is immunized with a polypeptide of the present invention or, more preferably, with a secreted polypeptide of the present invention-expressing cell. Such polypeptide-expressing cells are cultured in any suitable tissue culture medium, preferably in Earle's modified Eagle's medium supplemented with 10% fetal bovine serum (inactivated at about 56° C.), and supplemented with about 10 g/l of nonessential amino acids, about 1,000 U/ml of penicillin, and about 100 μg/ml of streptomycin.

[0937] The splenocytes of such mice are extracted and fused with a suitable myeloma cell line. Any suitable myeloma cell line may be employed in accordance with the present invention; however, it is preferable to employ the parent myeloma cell line (SP20), available from the ATCC. After fusion, the resulting hybridoma cells are selectively maintained in HAT medium, and then cloned by limiting dilution as described by Wands et al. (Gastroenterology 80:225-232 (1981)). The hybridoma cells obtained through such a selection are then assayed to identify clones which secrete antibodies capable of binding the polypeptide of the present invention.

[0938] Alternatively, additional antibodies capable of binding to polypeptide of the present invention can be produced in a two-step procedure using anti-idiotypic antibodies. Such a method makes use of the fact that antibodies are themselves antigens, and therefore, it is possible to obtain an antibody which binds to a second antibody. In accordance with this method, protein specific antibodies are used to immunize an animal, preferably a mouse. The splenocytes of such an animal are then used to produce hybridoma cells, and the hybridoma cells are screened to identify clones which produce an antibody whose ability to bind to the polypeptide of the present invention-specific antibody can be blocked by polypeptide of the present invention. Such antibodies comprise anti-idiotypic antibodies to the polypeptide of the present invention-specific antibody and are used to immunize an animal to induce formation of further polypeptide of the present invention-specific antibodies.

[0939] For in vivo use of antibodies in humans, an antibody is “humanized”. Such antibodies can be produced using genetic constructs derived from hybridoma cells producing the monoclonal antibodies described above. Methods for producing chimeric and humanized antibodies are known in the art and are discussed herein. (See, for review, Morrison, Science 229:1202 (1985); Oi et al., BioTechniques 4:214 (1986); Cabilly et al., U.S. Pat. No. 4,816,567; Taniguchi et al., EP 171496; Morrison et al., EP 173494; Neuberger et al., WO 8601533; Robinson et al., International Publication No. WO 8702671; Boulianne et al., Nature 312:643 (1984); Neuberger et al., Nature 314:268 (1985)).

[0940] b) Isolation of Antibody Fragments Directed Against Polypeptide of the Present Invention from a Library of scFvs

[0941] Naturally occurring V-genes isolated from human PBLs are constructed into a library of antibody fragments which contain reactivities against polypeptide of the present invention to which the donor may or may not have been exposed (see e.g., U.S. Pat. No. 5,885,793 incorporated herein by reference in its entirety).

[0942] Rescue of the Library. A library of scFvs is constructed from the RNA of human PBLs as described in International Publication No. WO 92/01047. To rescue phage displaying antibody fragments, approximately 10⁹ E. coli harboring the phagemid are used to inoculate 50 ml of 2× TY containing 1% glucose and 100 μg/ml of ampicillin (2× TY-AMP-GLU) and grown to an O.D. of 0.8 with shaking. Five ml of this culture is used to inoculate 50 ml of 2× TY-AMP-GLU, 2×10⁸ TU of delta gene 3 helper (M13 delta gene III, see International Publication No. WO 92/01047) are added and the culture incubated at 37° C. for 45 minutes without shaking and then at 37° C. for 45 minutes with shaking. The culture is centrifuged at 4000 r.p.m. for 10 min. and the pellet resuspended in 2 liters of 2× TY containing 100 μg/ml ampicillin and 50 ug/ml kanamycin and grown overnight. Phage are prepared as described in International Publication No. WO 92/01047.

[0943] M13 delta gene III is prepared as follows: M13 delta gene III helper phage does not encode gene III protein, hence the phage(mid) displaying antibody fragments have a greater avidity of binding to antigen. Infectious M13 delta gene III particles are made by growing the helper phage in cells harboring a pUC19 derivative supplying the wild type gene III protein during phage morphogenesis. The culture is incubated for 1 hour at 37° C. without shaking and then for a further hour at 37° C. with shaking. Cells are spun down (IEC-Centra 8,400 r.p.m. for 10 min), resuspended in 300 ml 2× TY broth containing 100 μg ampicillin/ml and 25 μg kanamycin/ml (2xTY-AMP-KAN) and grown overnight, shaking at 37° C. Phage particles are purified and concentrated from the culture medium by two PEG-precipitations (Sambrook et al., 1990), resuspended in 2 ml PBS and passed through a 0.45 μm filter (Minisart NML; Sartorius) to give a final concentration of approximately 10¹³ transducing units/ml (ampicillin-resistant clones).

[0944] Panning of the Library. Immunotubes (Nunc) are coated overnight in PBS with 4 ml of either 100 μg/ml or 10 μg/ml of a polypeptide of the present invention. Tubes are blocked with 2% Marvel-PBS for 2 hours at 37° C. and then washed 3 times in PBS. Approximately 10¹³ TU of phage is applied to the tube and incubated for 30 minutes at room temperature tumbling on an over and under turntable and then left to stand for another 1.5 hours. Tubes are washed 10 times with PBS 0.1% Tween-20 and 10 times with PBS. Phage are eluted by adding 1 ml of 100 mM triethylamine and rotating 15 minutes on an under and over turntable after which the solution is immediately neutralized with 0.5 ml of 1.OM Tris-HCl, pH 7.4. Phage are then used to infect 10 ml of mid-log E. coli TG1 by incubating eluted phage with bacteria for 30 minutes at 37° C. The E. coli are then plated on TYE plates containing 1% glucose and 100 μg/ml ampicillin. The resulting bacterial library is then rescued with delta gene 3 helper phage as described above to prepare phage for a subsequent round of selection. This process is then repeated for a total of 4 rounds of affinity purification with tube-washing increased to 20 times with PBS, 0.1% Tween-20 and 20 times with PBS for rounds 3 and 4.

[0945] Characterization of Binders. Eluted phage from the 3rd and 4th rounds of selection are used to infect E. coli HB 2151 and soluble scFv is produced (Marks, et al., 1991) from single colonies for assay. ELISAs are performed with microtitre plates coated with either 10 μg/ml of the polypeptide of the present invention in 50 mM bicarbonate pH 9.6. Clones positive in ELISA are further characterized by PCR fingerprinting (see, e.g., International Publication No. WO 92/01047) and then by sequencing. These ELISA positive clones may also be further characterized by techniques known in the art, such as, for example, epitope mapping, binding affinity, receptor signal transduction, ability to block or competitively inhibit antibody/antigen binding, and competitive agonistic or antagonistic activity.

### Example 11

### Method ofDetermining Alterations in a Gene Corresponding to a Polynucleotide

[0946] RNA isolated from entire families or individual patients presenting with a phenotype of interest (such as a disease) is isolated. cDNA is then generated from these RNA samples using protocols known in the art. (See, Sambrook.) The cDNA is then used as a template for PCR, employing primers surrounding regions of interest in SEQ ID NO:X; and/or the nucleotide sequence of the CDNA contained in Clone ID NO:Z. Suggested PCR conditions consist of 35 cycles at 95 degrees C for 30 seconds; 60-120 seconds at 52-58 degrees C; and 60-120 seconds at 70 degrees C, using buffer solutions described in Sidransky et al., Science 252:706 (1991).

[0947] PCR products are then sequenced using primers labeled at their 5′ end with T4 polynucleotide kinase, employing SequiTherm Polymerase (Epicentre Technologies). The intron-exon boundaries of selected exons is also determined and genomic PCR products analyzed to confirm the results. PCR products harboring suspected mutations are then cloned and sequenced to validate the results of the direct sequencing.

[0948] PCR products are cloned into T-tailed vectors as described in Holton et al., Nucleic Acids Research, 19:1156 (1991) and sequenced with T7 polymerase (United States Biochemical). Affected individuals are identified by mutations not present in unaffected individuals.

[0949] Genomic rearrangements are also observed as a method of determining alterations in a gene corresponding to a polynucleotide. Genomic clones isolated according to Example 2 are nick-translated with digoxigenindeoxy-uridine 5′-triphosphate (Boehringer Manheim), and FISH performed as described in Johnson et al., Methods Cell Biol. 35:73-99 (1991). Hybridization with the labeled probe is carried out using a vast excess of human cot-1 DNA for specific hybridization to the corresponding genomic locus.

[0950] Chromosomes are counterstained with 4,6-diamino-2-phenylidole and propidium iodide, producing a combination of C- and R-bands. Aligned images for precise mapping are obtained using a triple-band filter set (Chroma Technology, Brattleboro, Vt.) in combination with a cooled charge-coupled device camera (Photometrics, Tucson, Ariz.) and variable excitation wavelength filters. (Johnson et al., Genet. Anal. Tech. Appl., 8:75 (1991)). Image collection, analysis and chromosomal fractional length measurements are performed using the ISee Graphical Program System. (Inovision Corporation, Durham, N.C.) Chromosome alterations of the genomic region hybridized by the probe are identified as insertions, deletions, and translocations. These alterations are used as a diagnostic marker for an associated disease.

### Example 12

### Method of Detecting Abnormal Levels of a Polypeptide in a Biological Sample

[0951] A polypeptide of the present invention can be detected in a biological sample, and if an increased or decreased level of the polypeptide is detected, this polypeptide is a marker for a particular phenotype. Methods of detection are numerous, and thus, it is understood that one skilled in the art can modify the following assay to fit their particular needs.

[0952] For example, antibody-sandwich ELISAs are used to detect polypeptides in a sample, preferably a biological sample. Wells of a microtiter plate are coated with specific antibodies, at a final concentration of 0.2 to 10 ug/ml. The antibodies are either monoclonal or polyclonal and are produced by the method described in Example 10. The wells are blocked so that non-specific binding of the polypeptide to the well is reduced.

[0953] The coated wells are then incubated for >2 hours at RT with a sample containing the polypeptide. Preferably, serial dilutions of the sample should be used to validate results. The plates are then washed three times with deionized or distilled water to remove unbound polypeptide.

[0954] Next, 50 ul of specific antibody-alkaline phosphatase conjugate, at a concentration of 25-400 ng, is added and incubated for 2 hours at room temperature. The plates are again washed three times with deionized or distilled water to remove unbound conjugate.

[0955] Add 75 ul of 4-methylumbelliferyl phosphate (MUP) or p-nitrophenyl phosphate (NPP) substrate solution to each well and incubate 1 hour at room temperature. Measure the reaction by a microtiter plate reader. Prepare a standard curve, using serial dilutions of a control sample, and plot polypeptide concentration on the X-axis (log scale) and fluorescence or absorbance of the Y-axis (linear scale). Interpolate the concentration of the polypeptide in the sample using the standard curve.

### Example 13

### Formulation

[0956] The invention also provides methods of treatment and/or prevention of diseases or disorders (such as, for example, any one or more of the diseases or disorders disclosed herein) by administration to a subject of an effective amount of a Therapeutic. By therapeutic is meant polynucleotides or polypeptides of the invention (including fragments and variants), agonists or antagonists thereof, and/or antibodies thereto, in combination with a pharmaceutically acceptable carrier type (e.g., a sterile carrier).

[0957] The Therapeutic will be formulated and dosed in a fashion consistent with good medical practice, taking into account the clinical condition of the individual patient (especially the side effects of treatment with the Therapeutic alone), the site of delivery, the method of administration, the scheduling of administration, and other factors known to practitioners. The “effective amount” for purposes herein is thus determined by such considerations.

[0958] As a general proposition, the total pharmaceutically effective amount of the Therapeutic administered parenterally per dose will be in the range of about lug/kg/day to 10 mg/kg/day of patient body weight, although, as noted above, this will be subject to therapeutic discretion. More preferably, this dose is at least 0.01 mg/kg/day, and most preferably for humans between about 0.01 and 1 mg/kg/day for the hormone. If given continuously, the Therapeutic is typically administered at a dose rate of about 1 ug/kg/hour to about 50 ug/kg/hour, either by 1-4 injections per day or by continuous subcutaneous infusions, for example, using a mini-pump. An intravenous bag solution may also be employed. The length of treatment needed to observe changes and the interval following treatment for responses to occur appears to vary depending on the desired effect.

[0959] Therapeutics can be are administered orally, rectally, parenterally, intracistemally, intravaginally, intraperitoneally, topically (as by powders, ointments, gels, drops or transdermal patch), bucally, or as an oral or nasal spray. “Pharmaceutically acceptable carrier” refers to a non-toxic solid, semisolid or liquid filler, diluent, encapsulating material or formulation auxiliary of any. The term “parenteral” as used herein refers to modes of administration which include intravenous, intramuscular, intraperitoneal, intrastemal, subcutaneous and intraarticular injection and infusion.

[0960] Therapeutics of the invention are also suitably administered by sustained-release systems. Suitable examples of sustained-release Therapeutics are administered orally, rectally, parenterally, intracistemally, intravaginally, intraperitoneally, topically (as by powders, ointments, gels, drops or transdermal patch), bucally, or as an oral or nasal spray. “Pharmaceutically acceptable carrier” refers to a non-toxic solid, semisolid or liquid filler, diluent, encapsulating material or formulation auxiliary of any type. The term “parenteral” as used herein refers to modes of administration which include intravenous, intramuscular, intraperitoneal, intrastemal, subcutaneous and intraarticular injection and infusion.

[0961] Therapeutics of the invention are also suitably administered by sustained-release systems. Suitable examples of sustained-release Therapeutics include suitable polymeric materials (such as, for example, semi-permeable polymer matrices in the form of shaped articles, e.g., films, or mirocapsules), suitable hydrophobic materials (for example as an emulsion in an acceptable oil) or ion exchange resins, and sparingly soluble derivatives (such as, for example, a sparingly soluble salt).

[0962] Sustained-release matrices include polylactides (U.S. Pat. No. 3,773,919, EP 58,481), copolymers of L-glutamic acid and gamma-ethyl-L-glutamate (Sidman et al., Biopolymers 22:547-556 (1983)), poly (2- hydroxyethyl methacrylate) (Langer et al., J. Biomed. Mater. Res. 15:167-277 (1981), and Langer, Chem. Tech. 12:98-105 (1982)), ethylene vinyl acetate (Langer et al., Id.) or poly-D- (-)-3-hydroxybutyric acid (EP 133,988).

[0963] Sustained-release Therapeutics also include liposomally entrapped Therapeutics of the invention (see generally, Langer, Science 249:1527-1533 (1990); Treat et al., in Liposomes in the Therapy of Infectious Disease and Cancer, Lopez-Berestein and Fidler (eds.), Liss, New York, pp. 317 -327 and 353-365 (1989)). Liposomes containing the Therapeutic are prepared by methods known per se: DE 3,218,121; Epstein et al., Proc. Natl. Acad. Sci. (USA) 82:3688-3692 (1985); Hwang et al., Proc. Natl. Acad. Sci.(USA) 77:4030-4034 (1980); EP 52,322; EP 36,676; EP 88,046; EP 143,949; EP 142,641; Japanese Pat. Appl. 83-118008; U.S. Pat. Nos. 4,485,045 and 4,544,545; and EP 102,324. Ordinarily, the liposomes are of the small (about 200-800 Angstroms) unilamellar type in which the lipid content is greater than about 30 mol. percent cholesterol, the selected proportion being adjusted for the optimal Therapeutic.

[0964] In yet an additional embodiment, the Therapeutics of the invention are delivered by way of a pump (see Langer, supra; Sefton, CRC Crit. Ref. Biomed. Eng. 14:201 (1987); Buchwald et al., Surgery 88:507 (1980); Saudek et al., N. Engl. J. Med. 321:574 (1989)).

[0965] Other controlled release systems are discussed in the review by Langer (Science 249:1527-1533 (1990)).

[0966] For parenteral administration, in one embodiment, the Therapeutic is formulated generally by mixing it at the desired degree of purity, in a unit dosage injectable form (solution, suspension, or emulsion), with a pharmaceutically acceptable carrier, i.e., one that is non-toxic to recipients at the dosages and concentrations employed and is compatible with other ingredients of the formulation. For example, the formulation preferably does not include oxidizing agents and other compounds that are known to be deleterious to the Therapeutic.

[0967] Generally, the formulations are prepared by contacting the Therapeutic uniformly and intimately with liquid carriers or finely divided solid carriers or both. Then, if necessary, the product is shaped into the desired formulation. Preferably the carrier is a parenteral carrier, more preferably a solution that is isotonic with the blood of the recipient. Examples of such carrier vehicles include water, saline, Ringer's solution, and dextrose solution. Non-aqueous vehicles such as fixed oils and ethyl oleate are also useful herein, as well as liposomes.

[0968] The carrier suitably contains minor amounts of additives such as substances that enhance isotonicity and chemical stability. Such materials are non-toxic to recipients at the dosages and concentrations employed, and include buffers such as phosphate, citrate, succinate, acetic acid, and other organic acids or their salts; antioxidants such as ascorbic acid; low molecular weight (less than about ten residues) polypeptides, e.g., polyarginine or tripeptides; proteins, such as serum albumin, gelatin, or immunoglobulins; hydrophilic polymers such as polyvinylpyrrolidone; amino acids, such as glycine, glutamic acid, aspartic acid, or arginine; monosaccharides, disaccharides, and other carbohydrates including cellulose or its derivatives, glucose, manose, or dextrins; chelating agents such as EDTA; sugar alcohols such as mannitol or sorbitol; counterions such as sodium; and/or nonionic surfactants such as polysorbates, poloxamers, or PEG.

[0969] The Therapeutic is typically formulated in such vehicles at a concentration of about 0.1 mg/ml to 100 mg/ml, preferably 1-10 mg/ml, at a pH of about 3 to 8. It will be understood that the use of certain of the foregoing excipients, carriers, or stabilizers will result in the formation of polypeptide salts.

[0970] Any pharmaceutical used for therapeutic administration can be sterile. Sterility is readily accomplished by filtration through sterile filtration membranes (e.g., 0.2 micron membranes). Therapeutics generally are placed into a container having a sterile access port, for example, an intravenous solution bag or vial having a stopper pierceable by a hypodermic injection needle.

[0971] Therapeutics ordinarily will be stored in unit or multi-dose containers, for example, sealed ampoules or vials, as an aqueous solution or as a lyophilized formulation for reconstitution. As an example of a lyophilized formulation, 10-ml vials are filled with 5 ml of sterile-filtered 1% (w/v) aqueous Therapeutic solution, and the resulting mixture is lyophilized. The infusion solution is prepared by reconstituting the lyophilized Therapeutic using bacteriostatic Water-for-Injection.

[0972] The invention also provides a pharmaceutical pack or kit comprising one or more containers filled with one or more of the ingredients of the Therapeutics of the invention. Associated with such container(s) can be a notice in the form prescribed by a governmental agency regulating the manufacture, use or sale of pharmaceuticals or biological products, which notice reflects approval by the agency of manufacture, use or sale for human administration. In addition, the Therapeutics may be employed in conjunction with other therapeutic compounds.

[0973] The Therapeutics of the invention may be administered alone or in combination with adjuvants. Adjuvants that may be administered with the Therapeutics of the invention include, but are not limited to, alum, alum plus deoxycholate (ImmunoAg), MTP-PE (Biocine Corp.), QS21 (Genentech, Inc.), BCG (e.g., THERACYS®), MPL and nonviable prepartions of Corynebacterium parvum. In a specific embodiment, Therapeutics of the invention are administered in combination with alum. In another specific embodiment, Therapeutics of the invention are administered in combination with QS-21. Further adjuvants that may be administered with the Therapeutics of the invention include, but are not limited to, Monophosphoryl lipid immunomodulator, AdjuVax 100a, QS-21, QS-18, CRL1005, Aluminum salts, MF-59, and Virosomal adjuvant technology. Vaccines that may be administered with the Therapeutics of the invention include, but are not limited to, vaccines directed toward protection against MMR (measles, mumps, rubella), polio, varicella, tetanus/diptheria, hepatitis A, hepatitis B, haemophilus influenzae B, whooping cough, pneumonia, influenza, Lyme's Disease, rotavirus, cholera, yellow fever, Japanese encephalitis, poliomyelitis, rabies, typhoid fever, and pertussis. Combinations may be administered either concomitantly, e.g., as an admixture, separately but simultaneously or concurrently; or sequentially. This includes presentations in which the combined agents are administered together as a therapeutic mixture, and also procedures in which the combined agents are administered separately but simultaneously, e.g., as through separate intravenous lines into the same individual. Administration “in combination” further includes the separate administration of one of the compounds or agents given first, followed by the second.

[0974] The Therapeutics of the invention may be administered alone or in combination with other therapeutic agents. Therapeutic agents that may be administered in combination with the Therapeutics of the invention, include but are not limited to, steroidal and non-steroidal anti-inflammatory agents, antibiotics, anti-viral agents, anti-opportunistic infection agents, immunosupressive agents, chemotherapeutic agents, conventional immunotherapeutic agents, cytokines and/or growth factors. Combinations may be administered either concomitantly, e.g., as an admixture, separately but simultaneously or concurrently; or sequentially. This includes presentations in which the combined agents are administered together as a therapeutic mixture, and also procedures in which the combined agents are administered separately but simultaneously, e.g., as through separate intravenous lines into the same individual. Administration “in combination” further includes the separate administration of one of the compounds or agents given first, followed by the second.

[0975] In one embodiment, the Therapeutics of the invention are administered in combination with an anticoagulant. Anticoagulants that may be administered with the compositions of the invention include, but are not limited to, heparin, low molecular weight heparin, warfarin sodium (e.g., COUMADIN®), dicumarol, 4-hydroxycoumarin, anisindione (e.g., MIRADON™), acenocoumarol (e.g., nicoumalone, SINTHROME™), indan-1,3-dione, phenprocoumon (e.g., MARCUMAR™), ethyl biscoumacetate (e.g., TROMEXAN™), and aspirin. In a specific embodiment, compositions of the invention are administered in combination with heparin and/or warfarin. In another specific embodiment, compositions of the invention are administered in combination with warfarin. In another specific embodiment, compositions of the invention are administered in combination with warfarin and aspirin. In another specific embodiment, compositions of the invention are administered in combination with heparin. In another specific embodiment, compositions of the invention are administered in combination with heparin and aspirin.

[0976] In another embodiment, the Therapeutics of the invention are administered in combination with thrombolytic drugs. Thrombolytic drugs that may be administered with the compositions of the invention include, but are not limited to, plasminogen, lys-plasminogen, alpha2-antiplasmin, streptokinae (e.g., KABIKINASE™), antiresplace (e.g., EMINASE™), tissue plasminogen activator (t-PA, altevase, ACTIVASE™), urokinase (e.g., ABBOKINASE™), sauruplase, (Prourokinase, single chain urokinase), and aminocaproic acid (e.g., AMICAR™). In a specific embodiment, compositions of the invention are administered in combination with tissue plasminogen activator and aspirin.

[0977] In another embodiment, the Therapeutics of the invention are administered in combination with antiplatelet drugs. Antiplatelet drugs that may be administered with the compositions of the invention include, but are not limited to, aspirin, dipyridamole (e.g., PERSANTINETM), and ticlopidine (e.g., TICLIDTM).

[0978] In specific embodiments, the use of anti-coagulants, thrombolytic and/or antiplatelet drugs in combination with Therapeutics of the invention is contemplated for the prevention, diagnosis, and/or treatment of thrombosis, arterial thrombosis, venous thrombosis, thromboembolism, pulmonary embolism, atherosclerosis, myocardial infarction, transient ischemic attack, unstable angina. In specific embodiments, the use of anticoagulants, thrombolytic drugs and/or antiplatelet drugs in combination with Therapeutics of the invention is contemplated for the prevention of occulsion of saphenous grafts, for reducing the risk of periprocedural thrombosis as might accompany angioplasty procedures, for reducing the risk of stroke in patients with atrial fibrillation including nonrheumatic atrial fibrillation, for reducing the risk of embolism associated with mechanical heart valves and or mitral valves disease. Other uses for the therapeutics of the invention, alone or in combination with antiplatelet, anticoagulant, and/or thrombolytic drugs, include, but are not limited to, the prevention of occlusions in extracorporeal devices (e.g., intravascular canulas, vascular access shunts in hemodialysis patients, hemodialysis machines, and cardiopulmonary bypass machines).

[0979] In certain embodiments, Therapeutics of the invention are administered in combination with antiretroviral agents, nucleoside/nucleotide reverse transcriptase inhibitors (NRTIs), non-nucleoside reverse transcriptase inhibitors (NNRTIs), and/or protease inhibitors (PIs). NRTIs that may be administered in combination with the Therapeutics of the invention, include, but are not limited to, RETROVIR™ (zidovudine/AZT), VIDEX™ (didanosine/ddI), HIVID™ (zalcitabine/ddC), ZERIT” (stavudine/d4T), EPIVIR™ (lamivudine/3TC), and COMBIVIR™ (zidovudine/lamivudine). NNRTIs that may be administered in combination with the Therapeutics of the invention, include, but are not limited to, VIRAMUNE™ (nevirapine), RESCRIPTOR™ (delavirdine), and SUSTIVA™ (efavirenz). Protease inhibitors that may be administered in combination with the Therapeutics of the invention, include, but are not limited to, CRIXIVAN™ (indinavir), NORVIR™ (ritonavir), INVIRASE™ (saquinavir), and VIRACEPT™ (nelfinavir). In a specific embodiment, antiretroviral agents, nucleoside reverse transcriptase inhibitors, non-nucleoside reverse transcriptase inhibitors, and/or protease inhibitors may be used in any combination with Therapeutics of the invention to treat AIDS and/or to prevent or treat HIV infection.

[0980] Additional NRTIs include LODENOSINE™ (F-ddA; an acid-stable adenosine NRTI; Triangle/Abbott; COVIRACIL™ (emtricitabine/FTC; structurally related to lamivudine (3TC) but with 3- to 10-fold greater activity in vitro; Triangle/Abbott); dOTC (BCH-10652, also structurally related to lamivudine but retains activity against a substantial proportion of lamivudine-resistant isolates; Biochem Pharma); Adefovir (refused approval for anti-HIV therapy by FDA; Gilead Sciences); PREVEON® (Adefovir Dipivoxil, the active prodrug of adefovir; its active form is PMEA-pp); TENOFOVIR™ (bis-POC PMPA, a PMPA prodrug; Gilead); DAPD/DXG (active metabolite of DAPD; Triangle/Abbott); D-D4FC (related to 3TC, with activity against AZT/3TC-resistant virus); GW420867× (Glaxo Wellcome); ZIAGEN™ (abacavir/159U89; Glaxo Wellcome Inc.); CS-87 (3′azido-2′,3′-dideoxyuridine; WO 99/66936); and S-acyl-2-thioethyl (SATE)-bearing prodrug forms of p-L-FD4C and p-L-FddC (WO 98/17281).

[0981] Additional NNRTIs include COACTINON™ (Emivirine/MKC-442, potent NNRTI of the HEPT class; Triangle/Abbott); CAPRAVIRINE™ (AG-1549/S-1153, a next generation NNRTI with activity against viruses containing the K103N mutation; Agouron); PNU-142721 (has 20- to 50-fold greater activity than its predecessor delavirdine and is active against K103N mutants; Pharmacia & Upjohn); DPC-961 and DPC-963 (second-generation derivatives of efavirenz, designed to be active against viruses with the K103N mutation; DuPont); GW-420867× (has 25-fold greater activity than HBY097 and is active against K103N mutants; Glaxo Wellcome); CALANOLIDE A (naturally occurring agent from the latex tree; active against viruses containing either or both the Y181C and K103N mutations); and Propolis (WO 99/49830).

[0982] Additional protease inhibitors include LOPINAVIR™ (ABT378/r; Abbott Laboratories); BMS-23 2632 (an azapeptide; Bristol-Myres Squibb); TIPRANAVIR™ (PNU-140690, a non-peptic dihydropyrone; Pharmacia & Upjohn); PD-178390 (a nonpeptidic dihydropyrone; Parke-Davis); BMS 232632 (an azapeptide; Bristol-Myers Squibb); L-756,423 (an indinavir analog; Merck); DMP-450 (a cyclic urea compound; Avid & DuPont); AG-1776 (a peptidomimetic with in vitro activity against protease inhibitor-resistant viruses; Agouron); VX-175/GW-433908 (phosphate prodrug of amprenavir; Vertex & Glaxo Welcome); CGP61755 (Ciba); and AGENERASE™ (amprenavir; Glaxo Wellcome Inc.).

[0983] Additional antiretroviral agents include fusion inhibitors/gp41 binders. Fusion inhibitors/gp4l binders include T-20 (a peptide from residues 643-678 of the HIV gp41 transmembrane protein ectodomain which binds to gp41 in its resting state and prevents transformation to the fusogenic state; Trimeris) and T-1249 (a second-generation fusion inhibitor; Trimeris).

[0984] Additional antiretroviral agents include fusion inhibitors/chemokine receptor antagonists. Fusion inhibitors/chemokine receptor antagonists include CXCR4 antagonists such as AMD 3100 (a bicyclam), SDF-1 and its analogs, and ALX40-4C (a cationic peptide), T22 (an 18 amino acid peptide; Trimeris) and the T22 analogs T134 and T140; CCR5 antagonists such as RANTES (9-68), AOP-RANTES, NNY-RANTES, and TAK-779; and CCR5/CXCR4 antagonists such as NSC 651016 (a distamycin analog). Also included are CCR2B, CCR3, and CCR6 antagonists. Chemokine recpetor agonists such as RANTES, SDF-1, MIP-1α, MIP-1β, etc., may also inhibit fusion.

[0985] Additional antiretroviral agents include integrase inhibitors. Integrase inhibitors include dicaffeoylquinic (DFQA) acids; L-chicoric acid (a dicaffeoyltartaric (DCTA) acid); quinalizarin (QLC) and related anthraquinones; ZINTEVIR™ (AR 177, an oligonucleotide that probably acts at cell surface rather than being a true integrase inhibitor; Arondex); and naphthols such as those disclosed in WO 98/50347.

[0986] Additional antiretroviral agents include hydroxyurea-like compunds such as BCX-34 (a purine nucleoside phosphorylase inhibitor; Biocryst); ribonucleotide reductase inhibitors such as DIDOX™ (Molecules for Health); inosine monophosphate dehydrogenase (IMPDH) inhibitors sucha as VX-497 (Vertex); and mycopholic acids such as CellCept (mycophenolate mofetil; Roche).

[0987] Additional antiretroviral agents include inhibitors of viral integrase, inhibitors of viral genome nuclear translocation such as arylene bis(methylketone) compounds; inhibitors of HIV entry such as AOP-RANTES, NNY-RANTES, RANTES-IgG fusion protein, soluble complexes of RANTES and glycosaminoglycans (GAG), and AMD-3100; nucleocapsid zinc finger inhibitors such as dithiane compounds; targets of HIV Tat and Rev; and pharmacoenhancers such as ABT-378.

[0988] Other antiretroviral therapies and adjunct therapies include cytokines and lymphokines such as MIP-1α, MIP-1β, SDF-1α, IL-2, PROLEUKIN™ (aldesleukin/L2-7001; Chiron), IL-4, IL-10, IL-12, and IL-13; interferons such as IFN-α2a; antagonists of TNFs, NFKB, GM-CSF, M-CSF, and IL-10; agents that modulate immune activation such as cyclosporin and prednisone; vaccines such as Remune ^{M} (HIV Immunogen), APL 400-003 (Apollon), recombinant gp120 and fragments, bivalent (B/E) recombinant envelope glycoprotein, rgp120CM235, MN rgp120, SF-2 rgp120, gp120/soluble CD4 complex, Delta JR-FL protein, branched synthetic peptide derived from discontinuous gp120 C3/C4 domain, fusion-competent immunogens, and Gag, Pol, Nef, and Tat vaccines; gene-based therapies such as genetic suppressor elements (GSEs; WO 98/54366), and intrakines (genetically modified CC chemokines targetted to the ER to block surface expression of newly synthesized CCR5 (Yang et al., PNAS 94:11567-72 (1997); Chen et al., Nat. Med. 3:1110-16 (1997)); antibodies such as the anti-CXCR4 antibody 12G5, the anti-CCR5 antibodies 2D7, 5C7, PA8, PA9, PA10, PA11, PA12, and PA14, the anti-CD4 antibodies Q4120 and RPA-T4, the anti-CCR3 antibody 7B11, the anti-gp120 antibodies 17b, 48d, 447-52D, 257-D, 268-D and 50.1, anti-Tat antibodies, anti-TNF-α antibodies, and monoclonal antibody 33A; aryl hydrocarbon (AH) receptor agonists and antagonists such as TCDD, 3,3′,4,4′,5-pentachlorobiphenyl, 3,3′,4,4′-tetrachlorobiphenyl, and α-naphthoflavone (WO 98/30213); and antioxidants such as γ-L-glutamyl-L-cysteine ethyl ester (γ-GCE; WO 99/56764).

[0989] In a further embodiment, the Therapeutics of the invention are administered in combination with an antiviral agent. Antiviral agents that may be administered with the Therapeutics of the invention include, but are not limited to, acyclovir, ribavirin, amantadine, and remantidine.

[0990] In other embodiments, Therapeutics of the invention may be administered in combination with anti-opportunistic infection agents. Anti-opportunistic agents that may be administered in combination with the Therapeutics of the invention, include, but are not limited to, TRIMETHOPRIM-SULFAMETHOXAZOLE™, DAPSONE™, PENTAMIDINE™, ATOVAQUONE™, ISONIAZID™, RIFAMPIN™, PYRAZINAMIDE™, ETHAMBUTOL™, RIFABUTIN™, CLARITHROMYCIN™, AZITHROMYCIN™, GANCICLOVIR™, FOSCARNET™, CIDOFOVIR™, FLUCONAZOLE™, ITRACONAZOLE™, KETOCONAZOLE™, ACYCLOVIR™, FAMCICOLVIR™, PYRIMETHAMINE™, LEUCOVORIN™, NEUPOGEN™ (filgrastim/G-CSF), and LEUKINE™ (sargramostim/GM-CSF). In a specific embodiment, Therapeutics of the invention are used in any combination with TRIMETHOPRIM-SULFAMETHOXAZOLE™, DAPSONE™, PENTAMIDINE™, and/or ATOVAQUONE™ to prophylactically treat or prevent an opportunistic Pneumocystis carinii pneumonia infection. In another specific embodiment, Therapeutics of the invention are used in any combination with ISONIAZID™, RIFAMPIN™, PYRAZINAMIDE™, and/or ETHAMBUTOL™ to prophylactically treat or prevent an opportunistic Mycobacterium avium complex infection. In another specific embodiment, Therapeutics of the invention are used in any combination with RIFABUTIN™, CLARITHROMYCIN™, and/or AZITHROMYCIN™ to prophylactically treat or prevent an opportunistic Mycobacterium tuberculosis infection. In another specific embodiment, Therapeutics of the invention are used in any combination with GANCICLOVIR™, FOSCARNET™, and/or CIDOFOVIR™ to prophylactically treat or prevent an opportunistic cytomegalovirus infection. In another specific embodiment, Therapeutics of the invention are used in any combination with FLUCONAZOLE™, ITRACONAZOLE™, and/or KETOCONAZOLE™ to prophylactically treat or prevent an opportunistic fungal infection. In another specific embodiment, Therapeutics of the invention are used in any combination with ACYCLOVIR™ and/or FAMCICOLVIR™ to prophylactically treat or prevent an opportunistic herpes simplex virus type I and/or type II infection. In another specific embodiment, Therapeutics of the invention are used in any combination with PYRIMETHAMINE™ and/or LEUCOVORIN™ to prophylactically treat or prevent an opportunistic Toxoplasma gondii infection. In another specific embodiment, Therapeutics of the invention are used in any combination with LEUCOVORIN™ and/or NEUPOGEN™ to prophylactically treat or prevent an opportunistic bacterial infection.

[0991] In a further embodiment, the Therapeutics of the invention are administered in combination with an antibiotic agent. Antibiotic agents that may be administered with the Therapeutics of the invention include, but are not limited to, amoxicillin, beta-lactamases, aminoglycosides, beta-lactam (glycopeptide), beta-lactamases, Clindamycin, chloramphenicol, cephalosporins, ciprofloxacin, erythromycin, fluoroquinolones, macrolides, metronidazole, penicillins, quinolones, rapamycin, rifampin, streptomycin, sulfonamide, tetracyclines, trimethoprim, trimethoprim-sulfamethoxazole, and vancomycin.

[0992] In other embodiments, the Therapeutics of the invention are administered in combination with immunestimulants. Immunostimulants that may be administered in combination with the Therapeutics of the invention include, but are not limited to, levamisole (e.g., ERGAMISOL™), isoprinosine (e.g. INOSIPLEX™), interferons (e.g. interferon alpha), and interleukins (e.g., IL-2).

[0993] In other embodiments, Therapeutics of the invention are administered in combination with immunosuppressive agents. Immunosuppressive agents that may be administered in combination with the Therapeutics of the invention include, but are not limited to, steroids, cyclosporine, cyclosporine analogs, cyclophosphamide methylprednisone, prednisone, azathioprine, FK-506, 15-deoxyspergualin, and other immunosuppressive agents that act by suppressing the function of responding T cells. Other immunosuppressive agents that may be administered in combination with the Therapeutics of the invention include, but are not limited to, prednisolone, methotrexate, thalidomide, methoxsalen, rapamycin, leflunomide, mizoribine (BREDININ™), brequinar, deoxyspergualin, and azaspirane (SKF 105685), ORTHOCLONE OKT® 3 (muromonab-CD3), SANDIMMUNE™, NEORAL™, SANGDYA™ (cyclosporine), PROGRAF® (FK506, tacrolimus), CELLCEPT® (mycophenolate motefil, of which the active metabolite is mycophenolic acid), IMURAN™ (azathioprine), glucocorticosteroids, adrenocortical steroids such as DELTASONE™ (prednisone) and HYDELTRASOL™ (prednisolone), FOLEX™ and MEXATE™ (methotrxate), OXSORALEN-ULTRA™ (methoxsalen) and RAPAMUNE™ (sirolimus). In a specific embodiment, immunosuppressants may be used to prevent rejection of organ or bone marrow transplantation.

[0994] In an additional embodiment, Therapeutics of the invention are administered alone or in combination with one or more intravenous immune globulin preparations. Intravenous immune globulin preparations that may be administered with the Therapeutics of the invention include, but not limited to, GAMMAR™, IVEEGAM™, SANDOGLOBULIN™, GAMMAGARD S/D™, ATGAM™ (antithymocyte glubulin), and GAMIMUNE™. In a specific embodiment, Therapeutics of the invention are administered in combination with intravenous immune globulin preparations in transplantation therapy (e.g., bone marrow transplant).

[0995] In certain embodiments, the Therapeutics of the invention are administered alone or in combination with an anti-inflammatory agent. Anti-inflammatory agents that may be administered with the Therapeutics of the invention include, but are not limited to, corticosteroids (e.g. betamethasone, budesonide, cortisone, dexamethasone, hydrocortisone, methylprednisolone, prednisolone, prednisone, and triamcinolone), nonsteroidal anti-inflammatory drugs (e.g., diclofenac, diflunisal, etodolac, fenoprofen, floctafenine, flurbiprofen, ibuprofen, indomethacin, ketoprofen, meclofenamate, mefenamic acid, meloxicam, nabumetone, naproxen, oxaprozin, phenylbutazone, piroxicam, sulindac, tenoxicam, tiaprofenic acid, and tolmetin.), as well as antihistamines, aminoarylcarboxylic acid derivatives, arylacetic acid derivatives, arylbutyric acid derivatives, arylcarboxylic acids, arylpropionic acid derivatives, pyrazoles, pyrazolones, salicylic acid derivatives, thiazinecarboxamides, e-acetamidocaproic acid, S-adenosylmethionine, 3-amino-4-hydroxybutyric acid, amixetrine, bendazac, benzydamine, bucolome, difenpiramide, ditazol, emorfazone, guaiazulene, nabumetone, nimesulide, orgotein, oxaceprol, paranyline, perisoxal, pifoxime, proquazone, proxazole, and tenidap.

[0996] In an additional embodiment, the compositions of the invention are administered alone or in combination with an anti-angiogenic agent. Anti-angiogenic agents that may be administered with the compositions of the invention include, but are not limited to, Angiostatin (Entremed, Rockville, Md.), Troponin-1 (Boston Life Sciences, Boston, Mass.), anti-Invasive Factor, retinoic acid and derivatives thereof, paclitaxel (Taxol), Suramin, Tissue Inhibitor of Metalloproteinase-1, Tissue Inhibitor of Metalloproteinase-2, VEGI, Plasminogen Activator Inhibitor-1, Plasminogen Activator Inhibitor-2, and various forms of the lighter “d group” transition metals.

[0997] Lighter “d group” transition metals include, for example, vanadium, molybdenum, tungsten, titanium, niobium, and tantalum species. Such transition metal species may form transition metal complexes. Suitable complexes of the above-mentioned transition metal species include oxo transition metal complexes.

[0998] Representative examples of vanadium complexes include oxo vanadium complexes such as vanadate and vanadyl complexes. Suitable vanadate complexes include metavanadate and orthovanadate complexes such as, for example, ammonium metavanadate, sodium metavanadate, and sodium orthovanadate. Suitable vanadyl complexes include, for example, vanadyl acetylacetonate and vanadyl sulfate including vanadyl sulfate hydrates such as vanadyl sulfate mono- and trihydrates.

[0999] Representative examples of tungsten and molybdenum complexes also include oxo complexes. Suitable oxo tungsten complexes include tungstate and tungsten oxide complexes. Suitable tungstate complexes include ammonium tungstate, calcium tungstate, sodium tungstate dihydrate, and tungstic acid. Suitable tungsten oxides include tungsten (IV) oxide and tungsten (VI) oxide. Suitable oxo molybdenum complexes include molybdate, molybdenum oxide, and molybdenyl complexes. Suitable molybdate complexes include ammonium molybdate and its hydrates, sodium molybdate and its hydrates, and potassium molybdate and its hydrates. Suitable molybdenum oxides include molybdenum (VI) oxide, molybdenum (VI) oxide, and molybdic acid. Suitable molybdenyl complexes include, for example, molybdenyl acetylacetonate. Other suitable tungsten and molybdenum complexes include hydroxo derivatives derived from, for example, glycerol, tartaric acid, and sugars.

[1000] A wide variety of other anti-angiogenic factors may also be utilized within the context of the present invention. Representative examples include, but are not limited to, platelet factor 4; protamine sulphate; sulphated chitin derivatives (prepared from queen crab shells), (Murata et al., Cancer Res. 51:22-26, (1991)); Sulphated Polysaccharide Peptidoglycan Complex (SP- PG) (the function of this compound may be enhanced by the presence of steroids such as estrogen, and tamoxifen citrate); Staurosporine; modulators of matrix metabolism, including for example, proline analogs, cishydroxyproline, d,L-3,4-dehydroproline, Thiaproline, alpha,alpha-dipyridyl, aminopropionitrile fumarate; 4-propyl-5-(4-pyridinyl)-2(3H)-oxazolone; Methotrexate; Mitoxantrone; Heparin; Interferons; 2 Macroglobulin-serum; ChIMP-3 (Pavloff et al., J. Bio. Chem. 267:17321-17326, (1992)); Chymostatin (Tomkinson et al., Biochem J. 286:475-480, (1992)); Cyclodextrin Tetradecasulfate; Eponemycin; Camptothecin; Fumagillin (Ingber et al., Nature 348:555-557, (1990)); Gold Sodium Thiomalate (“GST”; Matsubara and Ziff, J. Clin. Invest. 79:1440-1446, (1987)); anticollagenase-serum; alpha2-antiplasmin (Holmes et al., J. Biol. Chem. 262(4):1659-1664, (1987)); Bisantrene (National Cancer Institute); Lobenzarit disodium (N-(2)-carboxyphenyl-4- chloroanthronilic acid disodium or “CCA”; (Takeuchi et al., Agents Actions 36:312-316, (1992)); and metalloproteinase inhibitors such as BB94.

[1001] Additional anti-angiogenic factors that may also be utilized within the context of the present invention include Thalidomide, (Celgene, Warren, NJ); Angiostatic steroid; AGM-1470 (H. Brem and J. Folkman JPediatr. Surg. 28:445-51 (1993)); an integrin alpha v beta 3 antagonist (C. Storgard et al., J Clin. Invest. 103:47-54 (1999)); carboxynaminolmidazole; Carboxyamidotriazole (CAI) (National Cancer Institute, Bethesda, Md.); Conbretastatin A-4 (CA4P) (OXiGENE, Boston, Mass.); Squalamine (Magainin Pharmaceuticals, Plymouth Meeting, Pa.); TNP-470, (Tap Pharmaceuticals, Deerfield, IL); ZD-0101 AstraZeneca (London, UK); APRA (CT2584); Benefin, Byrostatin-1 (SC339555); CGP-41251 (PKC 412); CM10; Dexrazoxane (ICRF187); DMXAA; Endostatin; Flavopridiol; Genestein; GTE; ImmTher; Iressa (ZD1839); Octreotide (Somatostatin); Panretin; Penacillamine; Photopoint; PI-88; Prinomastat (AG-3340) Purlytin; Suradista (FCE26644); Tamoxifen (Nolvadex); Tazarotene; Tetrathiomolybdate; Xeloda (Capecitabine); and 5-Fluorouracil.

[1002] Anti-angiogenic agents that may be administed in combination with the compounds of the invention may work through a variety of mechanisms including, but not limited to, inhibiting proteolysis of the extracellular matrix, blocking the function of endothelial cell-extracellular matrix adhesion molecules, by antagonizing the function of angiogenesis inducers such as growth factors, and inhibiting integrin receptors expressed on proliferating endothelial cells. Examples of anti-angiogenic inhibitors that interfere with extracellular matrix proteolysis and which may be administered in combination with the compositons of the invention include, but are not Imited to, AG-3340 (Agouron, La Jolla, Calif.), BAY-12-9566 (Bayer, West Haven, Conn.), BMS-275291 (Bristol Myers Squibb, Princeton, N.J.), CGS-27032A (Novartis, East Hanover, N.J.), Marimastat (British Biotech, Oxford, UK), and Metastat (Aeterna, St-Foy, Quebec). Examples of anti-angiogenic inhibitors that act by blocking the function of endothelial cell-extracellular matrix adhesion molecules and which may be administered in combination with the compositons of the invention include, but are not Imited to, EMD-121974 (Merck KcgaA Darmstadt, Germany) and Vitaxin (Ixsys, La Jolla, Calif./Medimmune, Gaithersburg, Md.). Examples of anti-angiogenic agents that act by directly antagonizing or inhibiting angiogenesis inducers and which may be administered in combination with the compositons of the invention include, but are not Imited to, Angiozyme (Ribozyme, Boulder, Colo.), Anti-VEGF antibody (Genentech, S. San Francisco, Calif.), PTK-787/ZK-225846 (Novartis, Basel, Switzerland), SU-101 (Sugen, S. San Francisco, Calif.), SU-5416 (Sugen/Pharmacia Upjohn, Bridgewater, N.J.), and SU-6668 (Sugen). Other anti-angiogenic agents act to indirectly inhibit angiogenesis. Examples of indirect inhibitors of angiogenesis which may be administered in combination with the compositons of the invention include, but are not limited to, IM-862 (Cytran, Kirkland, Wash.), Interferon-alpha, IL-12 (Roche, Nutley, N.J.), and Pentosan polysulfate (Georgetown University, Washington, D.C.).

[1003] In particular embodiments, the use of compositions of the invention in combination with anti-angiogenic agents is contemplated for the treatment, prevention, and/or amelioration of an autoimmune disease, such as for example, an autoimmune disease described herein.

[1004] In a particular embodiment, the use of compositions of the invention in combination with anti-angiogenic agents is contemplated for the treatment, prevention, and/or amelioration of arthritis. In a more particular embodiment, the use of compositions of the invention in combination with anti-angiogenic agents is contemplated for the treatment, prevention, and/or amelioration of rheumatoid arthritis.

[1005] In another embodiment, the polynucleotides encoding a polypeptide of the present invention are administered in combination with an angiogenic protein, or polynucleotides encoding an angiogenic protein. Examples of angiogenic proteins that may be administered with the compositions of the invention include, but are not limited to, acidic and basic fibroblast growth factors, VEGF-1, VEGF-2, VEGF-3, epidermal growth factor alpha and beta, platelet-derived endothelial cell growth factor, platelet-derived growth factor, tumor necrosis factor alpha, hepatocyte growth factor, insulin-like growth factor, colony stimulating factor, macrophage colony stimulating factor, granulocyte/macrophage colony stimulating factor, and nitric oxide synthase.

[1006] In additional embodiments, compositions of the invention are administered in combination with a chemotherapeutic agent. Chemotherapeutic agents that may be administered with the Therapeutics of the invention include, but are not limited to alkylating agents such as nitrogen mustards (for example, Mechlorethamine, cyclophosphamide, Cyclophosphamide Ifosfamide, Melphalan (L-sarcolysin), and Chlorambucil), ethylenimines and methylmelamines (for example, Hexamethylmelamine and Thiotepa), alkyl sulfonates (for example, Busulfan), nitrosoureas (for example, Carmustine (BCNU), Lomustine (CCNU), Semustine (methyl-CCNU), and Streptozocin (streptozotocin)), triazenes (for example, Dacarbazine (DTIC; dimethyltriazenoimidazolecarboxamide)), folic acid analogs (for example, Methotrexate (amethopterin)), pyrimidine analogs (for example, Fluorouacil (5-fluorouracil; 5-FU), Floxuridine (fluorodeoxyuridine; FudR), and Cytarabine (cytosine arabinoside)), purine analogs and related inhibitors (for example, Mercaptopurine (6-mercaptopurine; 6-MP), Thioguanine (6-thioguanine; TG), and Pentostatin (2′-deoxycoformycin)), vinca alkaloids (for example, Vinblastine (VLB, vinblastine sulfate)) and Vincristine (vincristine sulfate)), epipodophyllotoxins (for example, Etoposide and Teniposide), antibiotics (for example, Dactinomycin (actinomycin D), Daunorubicin (daunomycin; rubidomycin), Doxorubicin, Bleomycin, Plicamycin (mithramycin), and Mitomycin (mitomycin C), enzymes (for example, L-Asparaginase), biological response modifiers (for example, Interferon-alpha and interferon-alpha-2b), platinum coordination compounds (for example, Cisplatin (cis-DDP) and Carboplatin), anthracenedione (Mitoxantrone), substituted ureas (for example, Hydroxyurea), methylhydrazine derivatives (for example, Procarbazine (N-methylhydrazine; MIH), adrenocorticosteroids (for example, Prednisone), progestins (for example, Hydroxyprogesterone caproate, Medroxyprogesterone, Medroxyprogesterone acetate, and Megestrol acetate), estrogens (for example, Diethylstilbestrol (DES), Diethylstilbestrol diphosphate, Estradiol, and Ethinyl estradiol), antiestrogens (for example, Tamoxifen), androgens (Testosterone proprionate, and Fluoxymesterone), antiandrogens (for example, Flutamide), gonadotropin-releasing horomone analogs (for example, Leuprolide), other hormones and hormone analogs (for example, methyltestosterone, estramustine, estramustine phosphate sodium, chlorotrianisene, and testolactone), and others (for example, dicarbazine, glutamic acid, and mitotane).

[1007] In one embodiment, the compositions of the invention are administered in combination with one or more of the following drugs: infliximab (also known as Remicade™ Centocor, Inc.), Trocade (Roche, RO-32-3555), Leflunomide (also known as Arava™ from Hoechst Marion Roussel), Kineret™ (an IL-1 Receptor antagonist also known as Anakinra from Amgen, Inc.)

[1008] In a specific embodiment, compositions of the invention are administered in combination with CHOP (cyclophosphamide, doxorubicin, vincristine, and prednisone) or combination of one or more of the components of CHOP. In one embodiment, the compositions of the invention are administered in combination with anti-CD20 antibodies, human monoclonal anti-CD20 antibodies. In another embodiment, the compositions of the invention are administered in combination with anti-CD20 antibodies and CHOP, or anti-CD20 antibodies and any combination of one or more of the components of CHOP, particularly cyclophosphamide and/or prednisone. In a specific embodiment, compositions of the invention are administered in combination with Rituximab. In a further embodiment, compositions of the invention are administered with Rituximab and CHOP, or Rituximab and any combination of one or more of the components of CHOP, particularly cyclophosphamide and/or prednisone. In a specific embodiment, compositions of the invention are administered in combination with tositumomab. In a farther embodiment, compositions of the invention are administered with tositumomab and CHOP, or tositumomab and any combination of one or more of the components of CHOP, particularly cyclophosphamide and/or prednisone. The anti-CD20 antibodies may optionally be associated with radioisotopes, toxins or cytotoxic prodrugs.

[1009] In another specific embodiment, the compositions of the invention are administered in combination Zevalin™. In a further embodiment, compositions of the invention are administered with Zevalin™ and CHOP, or Zevalin™ and any combination of one or more of the components of CHOP, particularly cyclophosphamide and/or prednisone. Zevalin™ may be associated with one or more radisotopes. Particularly preferred isotopes are ⁹⁰Y and ¹¹¹In.

[1010] In an additional embodiment, the Therapeutics of the invention are administered in combination with cytokines. Cytokines that may be administered with the Therapeutics of the invention include, but are not limited to, IL2, IL3, IL4, IL5, IL6, IL7, IL10, IL12, IL13, IL15, anti-CD40, CD40L, IFN-gamma and TNF-alpha. In another embodiment, Therapeutics of the invention may be administered with any interleukin, including, but not limited to, IL-lalpha, IL-lbeta, IL-2, IL-3, IL-4, IL-5, IL-6, IL-7, IL-8, IL-9, IL-10, IL-11, IL-12, IL-13, IL-14, IL-15, IL-16, IL-17, IL-18, IL-19, IL-20, and IL-21.

[1011] In one embodiment, the Therapeutics of the invention are administered in combination with members of the TNF family. TNF, TNF-related or TNF-like molecules that may be administered with the Therapeutics of the invention include, but are not limited to, soluble forms of TNF-alpha, lymphotoxin-alpha (LT-alpha, also known as TNF-beta), LT-beta (found in complex heterotrimer LT-alpha2-beta), OPGL, FasL, CD27L, CD30L, CD40L, 4-IBBL, DcR3, OX40L, TNF-gamma (International Publication No. WO 96/14328), AIM-I (International Publication No. WO 97/33899), endokine-alpha (International Publication No. WO 98/07880), OPG, and neutrokine-alpha (International Publication No. WO 98/18921, OX40, and nerve growth factor (NGF), and soluble forms of Fas, CD30, CD27, CD40 and 4-IBB, TR2 (International Publication No. WO 96/34095), DR3 (International Publication No. WO 97/33904), DR4 (International Publication No. WO 98/32856), TR5 (International Publication No. WO 98/30693), TRANK, TR9 (International Publication No. WO 98/56892),TR10 (International Publication No. WO 98/54202), 312C2 (International Publication No. WO 98/06842), and TRi2, and soluble forms CD154, CD70, and CD153.

[1012] In an additional embodiment, the Therapeutics of the invention are administered in combination with angiogenic proteins. Angiogenic proteins that may be administered with the Therapeutics of the invention include, but are not limited to, Glioma Derived Growth Factor (GDGF), as disclosed in European Patent Number EP-399816; Platelet Derived Growth Factor-A (PDGF-A), as disclosed in European Patent Number EP-6821 10; Platelet Derived Growth Factor-B (PDGF-B), as disclosed in European Patent Number EP-282317; Placental Growth Factor (PIGF), as disclosed in International Publication Number WO 92/06194; Placental Growth Factor-2 (PIGF-2), as disclosed in Hauser et al., Growth Factors, 4:259-268 (1993); Vascular Endothelial Growth Factor (VEGF), as disclosed in International Publication Number WO 90/13649; Vascular Endothelial Growth Factor-A (VEGF-A), as disclosed in European Patent Number EP-506477; Vascular Endothelial Growth Factor-2 (VEGF-2), as disclosed in International Publication Number WO 96/39515; Vascular Endothelial Growth Factor B (VEGF-3); Vascular Endothelial Growth Factor B-186 (VEGF-B186), as disclosed in International Publication Number WO 96/26736; Vascular Endothelial Growth Factor-D (VEGF-D), as disclosed in International Publication Number WO 98/02543; Vascular Endothelial Growth Factor-D (VEGF-D), as disclosed in International Publication Number WO 98/07832; and Vascular Endothelial Growth Factor-E (VEGF-E), as disclosed in German Patent Number DE19639601. The above mentioned references are herein incorporated by reference in their entireties.

[1013] In an additional embodiment, the Therapeutics of the invention are administered in combination with Fibroblast Growth Factors. Fibroblast Growth Factors that may be administered with the Therapeutics of the invention include, but are not limited to, FGF-1, FGF-2, FGF-3, FGF-4, FGF-5, FGF-6, FGF-7, FGF-8, FGF-9, FGF-10, FGF-11, FGF-12, FGF-13, FGF-14, and FGF-15.

[1014] In an additional embodiment, the Therapeutics of the invention are administered in combination with hematopoietic growth factors. Hematopoietic growth factors that may be administered with the Therapeutics of the invention include, but are not limited to, granulocyte macrophage colony stimulating factor (GM-CSF) (sargramostim, LEUKINE™, PROKINE™), granulocyte colony stimulating factor (G-CSF) (filgrastim, NEUPOGEN™), macrophage colony stimulating factor (M-CSF, CSF-1) erythropoietin (epoetin alfa, EPOGENTM, PROCRIT™), stem cell factor (SCF, c-kit ligand, steel factor), megakaryocyte colony stimulating factor, PIXY321 (a GMCSF/IL-3 fusion protein), interleukins, especially any one or more of IL-11 through IL-12, interferon-gamma, or thrombopoietin.

[1015] In certain embodiments, Therapeutics of the present invention are administered in combination with adrenergic blockers, such as, for example, acebutolol, atenolol, betaxolol, bisoprolol, carteolol, labetalol, metoprolol, nadolol, oxprenolol, penbutolol, pindolol, propranolol, sotalol, and timolol.

[1016] In another embodiment, the Therapeutics of the invention are administered in combination with an antiarrhythmic drug (e.g., adenosine, amidoarone, bretylium, digitalis, digoxin, digitoxin, diliazem, disopyramide, esmolol, flecainide, lidocaine, mexiletine, moricizine, phenytoin, procainamide, N-acetyl procainamide, propafenone, propranolol, quinidine, sotalol, tocainide, and verapamil).

[1017] In another embodiment, the Therapeutics of the invention are administered in combination with diuretic agents, such as carbonic anhydrase-inhibiting agents (e.g., acetazolamide, dichlorphenamide, and methazolamide), osmotic diuretics (e.g., glycerin, isosorbide, mannitol, and urea), diuretics that inhibit Na⁺-K⁺-2Cl⁻ symport (e.g., furosemide, bumetanide, azosemide, piretanide, tripamide, ethacrynic acid, muzolimine, and torsemide), thiazide and thiazide-like diuretics (e.g., bendroflumethiazide, benzthiazide, chlorothiazide, hydrochlorothiazide, hydroflumethiazide, methyclothiazide, polythiazide, trichormethiazide, chlorthalidone, indapamide, metolazone, and quinethazone), potassium sparing diuretics (e.g., amiloride and triamterene), and mineralcorticoid receptor antagonists (e.g., spironolactone, canrenone, and potassium canrenoate).

[1018] In one embodiment, the Therapeutics of the invention are administered in combination with treatments for endocrine and/or hormone imbalance disorders. Treatments for endocrine and/or hormone imbalance disorders include, but are not limited to, ¹²⁷I, radioactive isotopes of iodine such as ¹³¹I and ¹²³I; recombinant growth hormone, such as HUMATROPE™ (recombinant somatropin); growth hormone analogs such as PROTROPIN™ (somatrem); dopamine agonists such as PARLODEL™ (bromocriptine); somatostatin analogs such as SANDOSTATIN™ (octreotide); gonadotropin preparations such as PREGNYL™, A.P.L.™ and PROFASI™ (chorionic gonadotropin (CG)), PERGONAL™ (menotropins), and METRODIN™ (urofollitropin (uFSH)); synthetic human gonadotropin releasing hormone preparations such as FACTREL™ and LUTREPULSE™ (gonadorelin hydrochloride); synthetic gonadotropin agonists such as LUPRON™ (leuprolide acetate), SUPPRELIN™ (histrelin acetate), SYNAREL™ (nafarelin acetate), and ZOLADEX™ (goserelin acetate); synthetic preparations of thyrotropin-releasing hormone such as RELEFACT TRH™ and THYPINONE™ (protirelin); recombinant human TSH such as THYROGEN™; synthetic preparations of the sodium salts of the natural isomers of thyroid hormones such as L-T₄™, SYNTHROID™ and LEVOTHROID™ (levothyroxine sodium), L-T₃™, CYTOMEL™ and TRIOSTAT™ (liothyroine sodium), and THYROLAR™ (liotrix); antithyroid compounds such as 6-n-propylthiouracil (propylthiouracil), 1-methyl-2-mercaptoimidazole and TAPAZOLE™ (methimazole), NEO-MERCAZOLE™ (carbimazole); beta-adrenergic receptor antagonists such as propranolol and esmolol; Ca²⁺ channel blockers; dexamethasone and iodinated radiological contrast agents such as TELEPAQUE™ (iopanoic acid) and ORAGRAFIN™ (sodium ipodate).

[1019] Additional treatments for endocrine and/or hormone imbalance disorders include, but are not limited to, estrogens or congugated estrogens such as ESTRACE™ (estradiol), ESTINYL™ (ethinyl estradiol), PREMARIN™, ESTRATAB™, ORTHO-EST™, OGEN™ and estropipate (estrone), ESTROVIS™ (quinestrol), ESTRADERM™ (estradiol), DELESTROGEN™ and VALERGEN™ (estradiol valerate), DEPO-ESTRADIOL CYPIONATE™ and ESTROJECT LA™ (estradiol cypionate); antiestrogens such as NOLVADEX™ (tamoxifen), SEROPHENE™ and CLOMID™ (clomiphene); progestins such as DURALUTIN™ (hydroxyprogesterone caproate), MPA™ and DEPO-PROVERA™ (medroxyprogesterone acetate), PROVERA™ and CYCRIN™ (MPA), MEGACE™ (megestrol acetate), NORLUTIN™ (norethindrone), and NORLUTATE™ and AYGESTIN™ (norethindrone acetate); progesterone implants such as NORPLANT SYSTEM™ (subdermal implants of norgestrel); antiprogestins such as RU 486™ (mifepristone); hormonal contraceptives such as ENOVID™ (norethynodrel plus mestranol), PROGESTASERT™ (intrauterine device that releases progesterone), LOESTRIN™, BREVICON™, MODICON™, GENORA™, NELONA™, NORINYL™, OVACON-35™ and OVACON-50 (ethinyl estradiol/norethindrone), LEVLEN™, NORDETTE™, TRI-LEVLEN™ and TRIPHASIL-21™ (ethinyl estradiol/levonorgestrel) LO/OVRAL™ and OVRAL™ (ethinyl estradiol/norgestrel), DEMULEN™ (ethinyl estradiol/ethynodiol diacetate), NORINYL™, ORTHO NOVUM™, NORETHIN™, GENORA™, and NELOVAT™ (norethindrone/mestranol), DESOGEN™ and ORTHOCEPT™ (ethinyl estradiol/desogestrel), ORTHO-CYCLEN™ and ORTHO-TRICYCLEN™ (ethinyl estradiol/norgestimate), MICRONOR™ and NOR-QD™ (norethindrone), and OVRETTE™ (norgestrel).

[1020] Additional treatments for endocrine and/or hormone imbalance disorders include, but are not limited to, testosterone esters such as methenolone acetate and testosterone undecanoate; parenteral and oral androgens such as TESTOJECT-50™ (testosterone), TESTEX™ (testosterone propionate), DELATESTRYL™ (testosterone enanthate), DEPO-TESTOSTERONE™ (testosterone cypionate), DANOCRINE™ (danazol), HALOTESTIN™ (fluoxymesterone), ORETON METHYL™, TESTRED™ and VIRILON™ (methyltestosterone), and OXANDRIN™ (oxandrolone); testosterone transdermal systems such as TESTODERM™; androgen receptor antagonist and 5-alpha-reductase inhibitors such as ANDROCUR™ (cyproterone acetate), EULEXIN™ (flutamide), and PROSCAR™ (finasteride); adrenocorticotropic hormone preparations such as CORTROSYN™ (cosyntropin); adrenocortical steroids and their synthetic analogs such as ACLOVATE™ (alclometasone dipropionate), CYCLOCORT™ (amcinonide), BECLOVENT™ and VANCERIL™ (beclomethasone dipropionate), CELESTONE™ (betamethasone), BENISONE™ and UTICORT™ (betamethasone benzoate), DIPROSONE™ (betamethasone dipropionate), CELESTONE PHOSPHATE™ (betamethasone sodium phosphate), CELESTONE SOLUSPAN™ (betamethasone sodium phosphate and acetate), BETA-VAL™ and VALISONE™ (betamethasone valerate), TEMOVATE™ (clobetasol propionate), CLODERM™ (clocortolone pivalate), CORTEF™ and HYDROCORTONE™ (cortisol (hydrocortisone)), HYDROCORTONE ACETATE™ (cortisol (hydrocortisone) acetate), LOCOID™ (cortisol (hydrocortisone) butyrate), HYDROCORTONE PHOSPHATE™ (cortisol (hydrocortisone) sodium phosphate), A-HYDROCORT™ and SOLU CORTEF™ (cortisol (hydrocortisone) sodium succinate), WESTCORT™ (cortisol (hydrocortisone) valerate), CORTISONE ACETATE™ (cortisone acetate), DESOWEN™ and TRIDESILON™ (desonide), TOPICORT™ (desoximetasone), DECADRON™ (dexamethasone), DECADRON LA™ (dexamethasone acetate), DECADRON PHOSPHATE™ and HEXADROL PHOSPHATE™ (dexamethasone sodium phosphate), FLORONE™ and MAXIFLOR™ (diflorasone diacetate), FLORINEF ACETATE™ (fludrocortisone acetate), AEROBID™ and NASALIDE™ (flunisolide), FLUONID™ and SYNALAR™ (fluocinolone acetonide), LIDEX™ (fluocinonide), FLUOR-OP™ and FML™ (fluorometholone), CORDRAN™ (flurandrenolide), HALOG™ (halcinonide), HMS LIZUIFILM™ (medrysone), MEDROL™ (methylprednisolone), DEPO-MEDROL™ and MEDROL ACETATE™ (methylprednisone acetate), A-METHAPRED™ and SOLUMEDROL™ (methylprednisolone sodium succinate), ELOCON™ (mometasone furoate), HALDRONE™ (paramethasone acetate), DELTA-CORTEF™ (prednisolone), ECONOPRED™ (prednisolone acetate), HYDELTRASOL™ (prednisolone sodium phosphate), HYDELTRA-T.B.A™ (prednisolone tebutate), DELTASONE™ (prednisone), ARISTOCORT™ and KENACORT™ (triamcinolone), KENALOG™ (triamcinolone acetonide), ARISTOCORT™ and KENACORT DIACETATE™ (triamcinolone diacetate), and ARISTOSPAN™ (triamcinolone hexacetonide); inhibitors of biosynthesis and action of adrenocortical steroids such as CYTADREN™ (aminoglutethimide), NIZORAL™ (ketoconazole), MODRASTANE™ (trilostane), and METOPIRONE™ (metyrapone); bovine, porcine or human insulin or mixtures thereof; insulin analogs; recombinant human insulin such as HUMULIN™ and NOVOLIN™; oral hypoglycemic agents such as ORAMIDE™ and ORINASE™ (tolbutamide), DIABINESE™ (chlorpropamide), TOLAMIDE™ and TOLINASE™ (tolazamide), DYMELOR™ (acetohexamide), glibenclamide, MICRONASE™, DIBETA™ and GLYNASE™ (glyburide), GLUCOTROL™ (glipizide), and DIAMICRON™ (gliclazide), GLUCOPHAGE™ (metformin), ciglitazone, pioglitazone, and alpha-glucosidase inhibitors; bovine or porcine glucagon; somatostatins such as SANDOSTATIN™ (octreotide); and diazoxides such as PROGLYCEM™ (diazoxide).

[1021] In one embodiment, the Therapeutics of the invention are administered in combination with treatments for uterine motility disorders. Treatments for uterine motility disorders include, but are not limited to, estrogen drugs such as conjugated estrogens (e.g., PREMARIN® and ESTRATAB®), estradiols (e.g., CLIMARA® and ALORA®), estropipate, and chlorotrianisene; progestin drugs (e.g., AMEN® (medroxyprogesterone), MICRONOR® (norethidrone acetate), PROMETRIUM® progesterone, and megestrol acetate); and estrogen/progesterone combination therapies such as, for example, conjugated estrogens/medroxyprogesterone (e.g., PREMPRO™ and PREMPHASE®) and norethindrone acetate/ethinyl estsradiol (e.g., FEMHRT™).

[1022] In an additional embodiment, the Therapeutics of the invention are administered in combination with drugs effective in treating iron deficiency and hypochromic anemias, including but not limited to, ferrous sulfate (iron sulfate, FEOSOL™), ferrous fumarate (e.g., FEOSTAT™), ferrous gluconate (e.g., FERGON™), polysaccharide-iron complex (e.g., NIFEREX™), iron dextran injection (e.g., INFED™), cupric sulfate, pyroxidine, riboflavin, Vitamin B₁₂, cyancobalamin injection (e.g., REDISOL™, RUBRAMIN PC™), hydroxocobalamin, folic acid (e.g., FOLVITE™), leucovorin (folinic acid, 5-CHOH4PteGlu, citrovorum factor) or WELLCOVORIN (Calcium salt of leucovorin), transferrin or ferritin.

[1023] In certain embodiments, the Therapeutics of the invention are administered in combination with agents used to treat psychiatric disorders. Psychiatric drugs that may be administered with the Therapeutics of the invention include, but are not limited to, antipsychotic agents (e.g., chlorpromazine, chlorprothixene, clozapine, fluphenazine, haloperidol, loxapine, mesoridazine, molindone, olanzapine, perphenazine, pimozide, quetiapine, risperidone, thioridazine, thiothixene, trifluoperazine, and triflupromazine), antimanic agents (e.g., carbamazepine, divalproex sodium, lithium carbonate, and lithium citrate), antidepressants (e.g., amitriptyline, amoxapine, bupropion, citalopram, clomipramine, desipramine, doxepin, fluvoxamine, fluoxetine, imipramine, isocarboxazid, maprotiline, mirtazapine, nefazodone, nortriptyline, paroxetine, phenelzine, protriptyline, sertraline, tranylcypromine, trazodone, trimipramine, and venlafaxine), antianxiety agents (e.g., alprazolam, buspirone, chlordiazepoxide, clorazepate, diazepam, halazepam, lorazepam, oxazepam, and prazepam), and stimulants (e.g., d-amphetamine, methylphenidate, and pemoline).

[1024] In other embodiments, the Therapeutics of the invention are administered in combination with agents used to treat neurological disorders. Neurological agents that may be administered with the Therapeutics of the invention include, but are not limited to, antiepileptic agents (e.g., carbamazepine, clonazepam, ethosuximide, phenobarbital, phenytoin, primidone, valproic acid, divalproex sodium, felbamate, gabapentin, lamotrigine, levetiracetam, oxcarbazepine, tiagabine, topiramate, zonisamide, diazepam, lorazepam, and clonazepam), antiparkinsonian agents (e.g., levodopa/carbidopa, selegiline, amantidine, bromocriptine, pergolide, ropinirole, pramipexole, benztropine; biperiden; ethopropazine; procyclidine; trihexyphenidyl, tolcapone), and ALS therapeutics (e.g. riluzole).

[1025] In another embodiment, Therapeutics of the invention are administered in combination with vasodilating agents and/or calcium channel blocking agents. Vasodilating agents that may be administered with the Therapeutics of the invention include, but are not limited to, Angiotensin Converting Enzyme (ACE) inhibitors (e.g., papaverine, isoxsuprine, benazepril, captopril, cilazapril, enalapril, enalaprilat, fosinopril, lisinopril, moexipril, perindopril, quinapril, ramipril, spirapril, trandolapril, and nylidrin), and nitrates (e.g., isosorbide dinitrate, isosorbide mononitrate, and nitroglycerin). Examples of calcium channel blocking agents that may be administered in combination with the Therapeutics of the invention include, but are not limited to amlodipine, bepridil, diltiazem, felodipine, flunarizine, isradipine, nicardipine, nifedipine, nimodipine, and verapamil.

[1026] In certain embodiments, the Therapeutics of the invention are administered in combination with treatments for gastrointestinal disorders. Treatments for gastrointestinal disorders that may be administered with the Therapeutic of the invention include, but are not limited to, H₂ histamine receptor antagonists (e.g., TAGAMET™ (cimetidine), ZANTAC™ (ranitidine), PEPCID™ (famotidine), and AXID™ (nizatidine)); inhibitors of H⁺, K⁺ ATPase (e.g., PREVACID™ (lansoprazole) and PRILOSEC™ (omeprazole)); Bismuth compounds (e.g., PEPTO-BISMOL™ (bismuth subsalicylate) and DE-NOL™ (bismuth subcitrate)); various antacids; sucralfate; prostaglandin analogs (e.g. CYTOTEC™ (misoprostol)); muscarinic cholinergic antagonists; laxatives (e.g., surfactant laxatives, stimulant laxatives, saline and osmotic laxatives); antidiarrheal agents (e.g., LOMOTIL™ (diphenoxylate), MOTOFEN™ (diphenoxin), and IMODIUM™ (loperamide hydrochloride)), synthetic analogs of somatostatin such as SANDOSTATIN™ (octreotide), antiemetic agents (e.g., ZOFRAN™ (ondansetron), KYTRIL™ (granisetron hydrochloride), tropisetron, dolasetron, metoclopramide, chlorpromazine, perphenazine, prochlorperazine, promethazine, thiethylperazine, triflupromazine, domperidone, haloperidol, droperidol, trimethobenzamide, dexamethasone, methylprednisolone, dronabinol, and nabilone); D2 antagonists (e.g., metoclopramide, trimethobenzamide and chlorpromazine); bile salts; chenodeoxycholic acid; ursodeoxycholic acid; and pancreatic enzyme preparations such as pancreatin and pancrelipase.

[1027] In additional embodiments, the Therapeutics of the invention are administered in combination with other therapeutic or prophylactic regimens, such as, for example, radiation therapy.

### Example 14

### Method of Treating Decreased Levels of the Polypeptide

[1028] The present invention relates to a method for treating an individual in need of an increased level of a polypeptide of the invention in the body comprising administering to such an individual a composition comprising a therapeutically effective amount of an agonist of the invention (including polypeptides of the invention). Moreover, it will be appreciated that conditions caused by a decrease in the standard or normal expression level of a polypeptide of the present invention in an individual can be treated by administering the agonist or antagonist of the present invention. Thus, the invention also provides a method of treatment of an individual in need of an increased level of the polypeptide comprising administering to such an individual a Therapeutic comprising an amount of the agonist or antagonist to increase the activity level of the polypeptide in such an individual.

[1029] For example, a patient with decreased levels of a polypeptide receives a daily dose 0.1-100 ug/kg of the agonist or antagonist for six consecutive days. The exact details of the dosing scheme, based on administration and formulation, are provided in Example 13.

### Example 15

### Method of Treating Increased Levels of the Polypeptide

[1030] The present invention also relates to a method of treating an individual in need of a decreased level of a polypeptide of the invention in the body comprising administering to such an individual a composition comprising a therapeutically effective amount of an antagonist of the invention (including polypeptides and antibodies of the invention).

[1031] In one example, antisense technology is used to inhibit production of a polypeptide of the present invention. This technology is one example of a method of decreasing levels of a polypeptide, due to a variety of etiologies, such as cancer.

[1032] For example, a patient diagnosed with abnormally increased levels of a polypeptide is administered intravenously antisense polynucleotides at 0.5, 1.0, 1.5, 2.0 and 3.0 mg/kg day for 21 days. This treatment is repeated after a 7-day rest period if the treatment was well tolerated. The antisense polynucleotides of the present invention can be formulated using techniques and formulations described herein (e.g. see Example 13), or otherwise known in the art.

### Example 16

### Method of Treatment Using Gene Therapy-ex Vivo

[1033] One method of gene therapy transplants fibroblasts, which are capable of expressing a polypeptide, onto a patient. Generally, fibroblasts are obtained from a subject by skin biopsy. The resulting tissue is placed in tissue-culture medium and separated into small pieces. Small chunks of the tissue are placed on a wet surface of a tissue culture flask, approximately ten pieces are placed in each flask. The flask is turned upside down, closed tight and left at room temperature over night. After 24 hours at room temperature, the flask is inverted and the chunks of tissue remain fixed to the bottom of the flask and fresh media (e.g., Ham's F12 media, with 10% FBS, penicillin and streptomycin) is added. The flasks are then incubated at 37 degree C for approximately one week.

[1034] At this time, fresh media is added and subsequently changed every several days. After an additional two weeks in culture, a monolayer of fibroblasts emerge. The monolayer is trypsinized and scaled into larger flasks.

[1035] pMV-7 (Kirschmeier, P.T. et al., DNA, 7:219-25 (1988)), flanked by the long terminal repeats of the Moloney murine sarcoma virus, is digested with EcoRI and HindlIl and subsequently treated with calf intestinal phosphatase. The linear vector is fractionated on agarose gel and purified, using glass beads.

[1036] The cDNA encoding a polypeptide of the present invention can be amplified using PCR primers which correspond to the 5′ and 3′ end sequences respectively as set forth in Example 1 using primers and having appropriate restriction sites and initiation/stop codons, if necessary. Preferably, the 5′ primer contains an EcoRI site and the 3′ primer includes a HindIII site. Equal quantities of the Moloney murine sarcoma virus linear backbone and the amplified EcoRI and HindIII fragment are added together, in the presence of T4 DNA ligase. The resulting mixture is maintained under conditions appropriate for ligation of the two fragments. The ligation mixture is then used to transform bacteria HB101, which are then plated onto agar containing kanamycin for the purpose of confirming that the vector has the gene of interest properly inserted.

[1037] The amphotropic pA317 or GP+am12 packaging cells are grown in tissue culture to confluent density in Dulbecco's Modified Eagles Medium (DMEM) with 10% calf serum (CS), penicillin and streptomycin. The MSV vector containing the gene is then added to the media and the packaging cells transduced with the vector. The packaging cells now produce infectious viral particles containing the gene (the packaging cells are now referred to as producer cells).

[1038] Fresh media is added to the transduced producer cells, and subsequently, the media is harvested from a 10 cm plate of confluent producer cells. The spent media, containing the infectious viral particles, is filtered through a millipore filter to remove detached producer cells and this media is then used to infect fibroblast cells. Media is removed from a sub-confluent plate of fibroblasts and quickly replaced with the media from the producer cells. This media is removed and replaced with fresh media. If the titer of virus is high, then virtually all fibroblasts will be infected and no selection is required. If the titer is very low, then it is necessary to use a retroviral vector that has a selectable marker, such as neo or his. Once the fibroblasts have been efficiently infected, the fibroblasts are analyzed to determine whether protein is produced.

[1039] The engineered fibroblasts are then transplanted onto the host, either alone or after having been grown to confluence on cytodex 3 microcarrier beads.

### Example 17

### Gene Therapy Using Endogenous Genes Corresponding to Polynucleotides of the Invention

[1040] Another method of gene therapy according to the present invention involves operably associating the endogenous polynucleotide sequence of the invention with a promoter via homologous recombination as described, for example, in U.S. Pat. No. 5,641,670, issued Jun. 24, 1997; International Publication NO: WO 96/29411, published Sep. 26, 1996; International Publication NO: WO 94/12650, published Aug. 4, 1994; Koller et al., Proc. Natl. Acad. Sci. USA, 86:8932-8935 (1989); and Zijlstra et al., Nature, 342:435-438 (1989). This method involves the activation of a gene which is present in the target cells, but which is not expressed in the cells, or is expressed at a lower level than desired.

[1041] Polynucleotide constructs are made which contain a promoter and targeting sequences, which are homologous to the 5′ non-coding sequence of endogenous polynucleotide sequence, flanking the promoter. The targeting sequence will be sufficiently near the 5′ end of the polynucleotide sequence so the promoter will be operably linked to the endogenous sequence upon homologous recombination. The promoter and the targeting sequences can be amplified using PCR. Preferably, the amplified promoter contains distinct restriction enzyme sites on the 5′ and 3′ ends. Preferably, the 3′ end of the first targeting sequence contains the same restriction enzyme site as the 5′ end of the amplified promoter and the 5′ end of the second targeting sequence contains the same restriction site as the 3′ end of the amplified promoter.

[1042] The amplified promoter and the amplified targeting sequences are digested with the appropriate restriction enzymes and subsequently treated with calf intestinal phosphatase. The digested promoter and digested targeting sequences are added together in the presence of T4 DNA ligase. The resulting mixture is maintained under conditions appropriate for ligation of the two fragments. The construct is size fractionated on an agarose gel, then purified by phenol extraction and ethanol precipitation.

[1043] In this Example, the polynucleotide constructs are administered as naked polynucleotides via electroporation. However, the polynucleotide constructs may also be administered with transfection-facilitating agents, such as liposomes, viral sequences, viral particles, precipitating agents, etc. Such methods of delivery are known in the art.

[1044] Once the cells are transfected, homologous recombination will take place which results in the promoter being operably linked to the endogenous polynucleotide sequence. This results in the expression of polynucleotide corresponding to the polynucleotide in the cell. Expression may be detected by immunological staining, or any other method known in the art.

[1045] Fibroblasts are obtained from a subject by skin biopsy. The resulting tissue is placed in DMEM+10% fetal calf serum. Exponentially growing or early stationary phase fibroblasts are trypsinized and rinsed from the plastic surface with nutrient medium. An aliquot of the cell suspension is removed for counting, and the remaining cells are subjected to centrifugation. The supernatant is aspirated and the pellet is resuspended in 5 ml of electroporation buffer (20 mM HEPES pH 7.3, 137 mM NaCl, 5 mM KCl, 0.7 mM Na₂ HPO₄, 6 mM dextrose). The cells are recentrifuged, the supernatant aspirated, and the cells resuspended in electroporation buffer containing 1 mg/ml acetylated bovine serum albumin. The final cell suspension contains approximately 3×10⁶ cells/ml. Electroporation should be performed immediately following resuspension.

[1046] Plasmid DNA is prepared according to standard techniques. For example, to construct a plasmid for targeting to the locus corresponding to the polynucleotide of the invention, plasmid pUC18 (MBI Fermentas, Amherst, N.Y.) is digested with HindII. The CMV promoter is amplified by PCR with an XbaI site on the 5′ end and a BamHI site on the 3′ end. Two non-coding sequences are amplified via PCR: one non-coding sequence (fragment 1) is amplified with a HindIII site at the 5′ end and an Xba site at the 3′end; the other non-coding sequence (fragment 2) is amplified with a BamHI site at the Send and a HindlIl site at the 3′end. The CMV promoter and the fragments (1 and 2) are digested with the appropriate enzymes (CMV promoter—XbaI and BamHI; fragment 1—XbaI; fragment 2—BamHI) and ligated together. The resulting ligation product is digested with HindIII, and ligated with the HindlIl-digested pUC18 plasmid.

[1047] Plasmid DNA is added to a sterile cuvette with a 0.4 cm electrode gap (Bio-Rad). The final DNA concentration is generally at least 120 μg/ml. 0.5 ml of the cell suspension (containing approximately 1.5.×10⁶ cells) is then added to the cuvette, and the cell suspension and DNA solutions are gently mixed. Electroporation is performed with a Gene-Pulser apparatus (Bio-Rad). Capacitance and voltage are set at 960 μF and 250-300 V, respectively. As voltage increases, cell survival decreases, but the percentage of surviving cells that stably incorporate the introduced DNA into their genome increases dramatically. Given these parameters, a pulse time of approximately 14-20 mSec should be observed.

[1048] Electroporated cells are maintained at room temperature for approximately 5 min, and the contents of the cuvette are then gently removed with a sterile transfer pipette. The cells are added directly to 10 ml of prewarmed nutrient media (DMEM with 15% calf serum) in a 10 cm dish and incubated at 37 degree C. The following day, the media is aspirated and replaced with 10 ml of fresh media and incubated for a further 16-24 hours.

[1049] The engineered fibroblasts are then injected into the host, either alone or after having been grown to confluence on cytodex 3 microcarrier beads. The fibroblasts now produce the protein product. The fibroblasts can then be introduced into a patient as described above.

### Example 18

### Method of Treatment Using Gene Therapy—in vivo

[1050] Another aspect of the present invention is using in vivo gene therapy methods to treat disorders, diseases and conditions. The gene therapy method relates to the introduction of naked nucleic acid (DNA, RNA, and antisense DNA or RNA) sequences into an animal to increase or decrease the expression of the polypeptide. The polynucleotide of the present invention may be operatively linked to (i.e., associated with) a promoter or any other genetic elements necessary for the expression of the polypeptide by the target tissue. Such gene therapy and delivery techniques and methods are known in the art, see, for example, WO90/11092, WO98/11779; U.S. Pat. Nos. 5,693,622, 5,705,151, 5,580,859; Tabata et al., Cardiovasc. Res. 35(3):470-479 (1997); Chao et al., Pharmacol. Res. 35(6):517-522 (1997); Wolff, Neuromuscul. Disord. 7(5):314-318 (1997); Schwartz et al., Gene Ther. 3(5):405-411 (1996); Tsurumi et al., Circulation 94(12):3281-3290 (1996) (incorporated herein by reference).

[1051] The polynucleotide constructs may be delivered by any method that delivers injectable materials to the cells of an animal, such as, injection into the interstitial space of tissues (heart, muscle, skin, lung, liver, intestine and the like). The polynucleotide constructs can be delivered in a pharmaceutically acceptable liquid or aqueous carrier.

[1052] The term “naked” polynucleotide, DNA or RNA, refers to sequences that are free from any delivery vehicle that acts to assist, promote, or facilitate entry into the cell, including viral sequences, viral particles, liposome formulations, lipofectin or precipitating agents and the like. However, the polynucleotides of the present invention may also be delivered in liposome formulations (such as those taught in Felgner P.L. et al. (1995) Ann. NY Acad. Sci. 772:126-139 and Abdallah B. et al. (1995) Biol. Cell 85(1):1-7) which can be prepared by methods well known to those skilled in the art.

[1053] The polynucleotide vector constructs used in the gene therapy method are preferably constructs that will not integrate into the host genome nor will they contain sequences that allow for replication. Any strong promoter known to those skilled in the art can be used for driving the expression of DNA. Unlike other gene therapy techniques, one major advantage of introducing naked nucleic acid sequences into target cells is the transitory nature of the polynucleotide synthesis in the cells. Studies have shown that non-replicating DNA sequences can be introduced into cells to provide production of the desired polypeptide for periods of up to six months.

[1054] The polynucleotide construct can be delivered to the interstitial space of tissues within an animal, including muscle, skin, brain, lung, liver, spleen, bone marrow, thymus, heart, lymph, blood, bone, cartilage, pancreas, kidney, gall bladder, stomach, intestine, testis, ovary, uterus, rectum, nervous system, eye, gland, and connective tissue. Interstitial space of the tissues comprises the intercellular fluid, mucopolysaccharide matrix among the reticular fibers of organ tissues, elastic fibers in the walls of vessels or chambers, collagen fibers of fibrous tissues, or that same matrix within connective tissue ensheathing muscle cells or in the lacunae of bone. It is similarly the space occupied by the plasma of the circulation and the lymph fluid of the lymphatic channels. Delivery to the interstitial space of muscle tissue is preferred for the reasons discussed below. They may be conveniently delivered by injection into the tissues comprising these cells. They are preferably delivered to and expressed in persistent, non-dividing cells which are differentiated, although delivery and expression may be achieved in non-differentiated or less completely differentiated cells, such as, for example, stem cells of blood or skin fibroblasts. In vivo muscle cells are particularly competent in their ability to take up and express polynucleotides.

[1055] For the naked polynucleotide injection, an effective dosage amount of DNA or RNA will be in the range of from about 0.05 g/kg body weight to about 50 mg/kg body weight. Preferably the dosage will be from about 0.005 mg/kg to about 20 mg/kg and more preferably from about 0.05 mg/kg to about 5 mg/kg. Of course, as the artisan of ordinary skill will appreciate, this dosage will vary according to the tissue site of injection. The appropriate and effective dosage of nucleic acid sequence can readily be determined by those of ordinary skill in the art and may depend on the condition being treated and the route of administration. The preferred route of administration is by the parenteral route of injection into the interstitial space of tissues. However, other parenteral routes may also be used, such as, inhalation of an aerosol formulation particularly for delivery to lungs or bronchial tissues, throat or mucous membranes of the nose. In addition, naked polynucleotide constructs can be delivered to arteries during angioplasty by the catheter used in the procedure.

[1056] The dose response effects of injected polynucleotide in muscle in vivo is determined as follows. Suitable template DNA for production of mRNA coding for polypeptide of the present invention is prepared in accordance with a standard recombinant DNA methodology. The template DNA, which may be either circular or linear, is either used as naked DNA or complexed with liposomes. The quadriceps muscles of mice are then injected with various amounts of the template DNA.

[1057] Five to six week old female and male Balb/C mice are anesthetized by intraperitoneal injection with 0.3 ml of 2.5% Avertin. A 1.5 cm incision is made on the anterior thigh, and the quadriceps muscle is directly visualized. The template DNA is injected in 0.1 ml of carrier in a 1 cc syringe through a 27 gauge needle over one minute, approximately 0.5 cm from the distal insertion site of the muscle into the knee and about 0.2 cm deep. A suture is placed over the injection site for future localization, and the skin is closed with stainless steel clips.

[1058] After an appropriate incubation time (e.g., 7 days) muscle extracts are prepared by excising the entire quadriceps. Every fifth 15 um cross-section of the individual quadriceps muscles is histochemically stained for protein expression. A time course for protein expression may be done in a similar fashion except that quadriceps from different mice are harvested at different times. Persistence of DNA in muscle following injection may be determined by Southern blot analysis after preparing total cellular DNA and HIRT supernatants from injected and control mice. The results of the above experimentation in mice can be used to extrapolate proper dosages and other treatment parameters in humans and other animals using naked DNA.

### Example 19

### Transgenic Animals

[1059] The polypeptides of the invention can also be expressed in transgenic animals. Animals of any species, including, but not limited to, mice, rats, rabbits, hamsters, guinea pigs, pigs, micro-pigs, goats, sheep, cows and non-human primates, e.g., baboons, monkeys, and chimpanzees may be used to generate transgenic animals. In a specific embodiment, techniques described herein or otherwise known in the art, are used to express polypeptides of the invention in humans, as part of a gene therapy protocol.

[1060] Any technique known in the art may be used to introduce the transgene (i.e., polynucleotides of the invention) into animals to produce the founder lines of transgenic animals. Such techniques include, but are not limited to, pronuclear microinjection (Paterson et al., Appl. Microbiol. Biotechnol. 40:691-698 (1994); Carver et al., Biotechnology (NY) 11:1263-1270 (1993); Wright et al., Biotechnology (NY) 9:830-834 (1991); and Hoppe et al., U.S. Pat. No. 4,873,191 (1989)); retrovirus mediated gene transfer into germ lines (Van der Putten et al., Proc. Natl. Acad. Sci., USA 82:6148-6152 (1985)), blastocysts or embryos; gene targeting in embryonic stem cells (Thompson et al., Cell 56:313-321 (1989)); electroporation of cells or embryos (Lo, 1983, Mol Cell. Biol. 3:1803-1814 (1983)); introduction of the polynucleotides of the invention using a gene gun (see, e.g., Ulmer et al., Science 259:1745 (1993); introducing nucleic acid constructs into embryonic pleuripotent stem cells and transferring the stem cells back into the blastocyst; and sperm-mediated gene transfer (Lavitrano et al., Cell 57:717-723 (1989); etc. For a review of such techniques, see Gordon, “Transgenic Animals,” Intl. Rev. Cytol. 115:171-229 (1989), which is incorporated by reference herein in its entirety.

[1061] Any technique known in the art may be used to produce transgenic clones containing polynucleotides of the invention, for example, nuclear transfer into enucleated oocytes of nuclei from cultured embryonic, fetal, or adult cells induced to quiescence (Campell et al., Nature 380:64-66 (1996); Wilmut et al., Nature 385:810-813 (1997)).

[1062] The present invention provides for transgenic animals that carry the transgene in all their cells, as well as animals which carry the transgene in some, but not all their cells, i.e., mosaic animals or chimeric. The transgene may be integrated as a single transgene or as multiple copies such as in concatamers, e.g., head-to-head tandems or head-to-tail tandems. The transgene may also be selectively introduced into and activated in a particular cell type by following, for example, the teaching of Lasko et al. (Lasko et al., Proc. Natl. Acad. Sci. USA 89:6232-6236 (1992)). The regulatory sequences required for such a cell-type specific activation will depend upon the particular cell type of interest, and will be apparent to those of skill in the art. When it is desired that the polynucleotide transgene be integrated into the chromosomal site of the endogenous gene, gene targeting is preferred. Briefly, when such a technique is to be utilized, vectors containing some nucleotide sequences homologous to the endogenous gene are designed for the purpose of integrating, via homologous recombination with chromosomal sequences, into and disrupting the function of the nucleotide sequence of the endogenous gene. The transgene may also be selectively introduced into a particular cell type, thus inactivating the endogenous gene in only that cell type, by following, for example, the teaching of Gu et al. (Gu et al., Science 265:103-106 (1994)). The regulatory sequences required for such a cell-type specific inactivation will depend upon the particular cell type of interest, and will be apparent to those of skill in the art.

[1063] Once transgenic animals have been generated, the expression of the recombinant gene may be assayed utilizing standard techniques. Initial screening may be accomplished by Southern blot analysis or PCR techniques to analyze animal tissues to verify that integration of the transgene has taken place. The level of mRNA expression of the transgene in the tissues of the transgenic animals may also be assessed using techniques which include, but are not limited to, Northern blot analysis of tissue samples obtained from the animal, in situ hybridization analysis, and reverse transcriptase-PCR (rt-PCR). Samples of transgenic gene-expressing tissue may also be evaluated immunocytochemically or immunohistochemically using antibodies specific for the transgene product.

[1064] Once the founder animals are produced, they may be bred, inbred, outbred, or crossbred to produce colonies of the particular animal. Examples of such breeding strategies include, but are not limited to: outbreeding of founder animals with more than one integration site in order to establish separate lines; inbreeding of separate lines in order to produce compound transgenics that express the transgene at higher levels because of the effects of additive expression of each transgene; crossing of heterozygous transgenic animals to produce animals homozygous for a given integration site in order to both augment expression and eliminate the need for screening of animals by DNA analysis; crossing of separate homozygous lines to produce compound heterozygous or homozygous lines; and breeding to place the transgene on a distinct background that is appropriate for an experimental model of interest.

[1065] Transgenic animals of the invention have uses which include, but are not limited to, animal model systems useful in elaborating the biological function of polypeptides of the present invention, studying conditions and/or disorders associated with aberrant expression, and in screening for compounds effective in ameliorating such conditions and/or disorders.

### Example 20

### Knock-out Animals

[1066] Endogenous gene expression can also be reduced by inactivating or “knocking out” the gene and/or its promoter using targeted homologous recombination. (e.g., see Smithies et al., Nature 317:230-234 (1985); Thomas & Capecchi, Cell 51:503-512 (1987); Thompson et al., Cell 5:313-321 (1989); each of which is incorporated by reference herein in its entirety). For example, a mutant, non-functional polynucleotide of the invention (or a completely unrelated DNA sequence) flanked by DNA homologous to the endogenous polynucleotide sequence (either the coding regions or regulatory regions of the gene) can be used, with or without a selectable marker and/or a negative selectable marker, to transfect cells that express polypeptides of the invention in vivo. In another embodiment, techniques known in the art are used to generate knockouts in cells that contain, but do not express the gene of interest. Insertion of the DNA construct, via targeted homologous recombination, results in inactivation of the targeted gene. Such approaches are particularly suited in research and agricultural fields where modifications to embryonic stem cells can be used to generate animal offspring with an inactive targeted gene (e.g., see Thomas & Capecchi 1987 and Thompson 1989, supra). However this approach can be routinely adapted for use in humans provided the recombinant DNA constructs are directly administered or targeted to the required site in vivo using appropriate viral vectors that will be apparent to those of skill in the art.

[1067] In further embodiments of the invention, cells that are genetically engineered to express the polypeptides of the invention, or alternatively, that are genetically engineered not to express the polypeptides of the invention (e.g., knockouts) are administered to a patient in vivo. Such cells may be obtained from the patient (i.e., animal, including human) or an MHC compatible donor and can include, but are not limited to fibroblasts, bone marrow cells, blood cells (e.g., lymphocytes), adipocytes, muscle cells, endothelial cells etc. The cells are genetically engineered in vitro using recombinant DNA techniques to introduce the coding sequence of polypeptides of the invention into the cells, or alternatively, to disrupt the coding sequence and/or endogenous regulatory sequence associated with the polypeptides of the invention, e.g., by transduction (using viral vectors, and preferably vectors that integrate the transgene into the cell genome) or transfection procedures, including, but not limited to, the use of plasmids, cosmids, YACs, naked DNA, electroporation, liposomes, etc. The coding sequence of the polypeptides of the invention can be placed under the control of a strong constitutive or inducible promoter or promoter/enhancer to achieve expression, and preferably secretion, of the polypeptides of the invention. The engineered cells which express and preferably secrete the polypeptides of the invention can be introduced into the patient systemically, e.g., in the circulation, or intraperitoneally.

[1068] Alternatively, the cells can be incorporated into a matrix and implanted in the body, e.g., genetically engineered fibroblasts can be implanted as part of a skin graft; genetically engineered endothelial cells can be implanted as part of a lymphatic or vascular graft. (See, for example, Anderson et al. U.S. Pat. No. 5,399,349; and Mulligan & Wilson, U.S. Pat. No. 5,460,959 each of which is incorporated by reference herein in its entirety).

[1069] When the cells to be administered are non-autologous or non-MHC compatible cells, they can be administered using well known techniques which prevent the development of a host immune response against the introduced cells. For example, the cells may be introduced in an encapsulated form which, while allowing for an exchange of components with the immediate extracellular environment, does not allow the introduced cells to be recognized by the host immune system.

[1070] Transgenic and “knock-out” animals of the invention have uses which include, but are not limited to, animal model systems useful in elaborating the biological function of polypeptides of the present invention, studying conditions and/or disorders associated with aberrant expression, and in screening for compounds effective in ameliorating such conditions and/or disorders.

### Example 21

### Assays Detecting Stimulation or Inhibition of B Cell Proliferation and Differentiation

[1071] Generation of functional humoral immune responses requires both soluble and cognate signaling between B-lineage cells and their microenvironment. Signals may impart a positive stimulus that allows a B-lineage cell to continue its programmed development, or a negative stimulus that instructs the cell to arrest its current developmental pathway. To date, numerous stimulatory and inhibitory signals have been found to influence B cell responsiveness including IL-2, IL-4, IL-5, IL-6, IL-7, IL-10, IL-13, IL-14 and IL-15. Interestingly, these signals are by themselves weak effectors but can, in combination with various co-stimulatory proteins, induce activation, proliferation, differentiation, homing, tolerance and death among B cell populations.

[1072] One of the best studied classes of B-cell co-stimulatory proteins is the TNF-superfamily. Within this family CD40, CD27, and CD30 along with their respective ligands CD154, CD70, and CD153 have been found to regulate a variety of immune responses. Assays which allow for the detection and/or observation of the proliferation and differentiation of these B-cell populations and their precursors are valuable tools in determining the effects various proteins may have on these B-cell populations in terms of proliferation and differentiation. Listed below are two assays designed to allow for the detection of the differentiation, proliferation, or inhibition of B-cell populations and their precursors.

[1073] In Vitro Assay—Agonists or antagonists of the invention can be assessed for its ability to induce activation, proliferation, differentiation or inhibition and/or death in B-cell populations and their precursors. The activity of the agonists or antagonists of the invention on purified human tonsillar B cells, measured qualitatively over the dose range from 0.1 to 10,000 ng/mL, is assessed in a standard B-lymphocyte co-stimulation assay in which purified tonsillar B cells are cultured in the presence of either formalin-fixed Staphylococcus aureus Cowan I (SAC) or immobilized anti-human IgM antibody as the priming agent. Second signals such as IL-2 and IL-15 synergize with SAC and IgM crosslinking to elicit B cell proliferation as measured by tritiated-thymidine incorporation. Novel synergizing agents can be readily identified using this assay. The assay involves isolating human tonsillar B cells by magnetic bead (MACS) depletion of CD3-positive cells. The resulting cell population is greater than 95% B cells as assessed by expression of CD45R(B220).

[1074] Various dilutions of each sample are placed into individual wells of a 96-well plate to which are added 105 B-cells suspended in culture medium (RPMI 1640 containing 10% FBS, 5×10⁵M 2ME, 100 U/ml penicillin, lOug/ml streptomycin, and 10-5 dilution of SAC) in a total volume of 150 ul. Proliferation or inhibition is quantitated by a 20 h pulse (luCi/well) with 3H-thymidine (6.7 Ci/mM) beginning 72 h post factor addition. The positive and negative controls are IL2 and medium respectively.

[1075] In vivo Assay—BALB/c mice are injected (i.p.) twice per day with buffer only, or 2 mg/Kg of agonists or antagonists of the invention, or truncated forms thereof. Mice receive this treatment for 4 consecutive days, at which time they are sacrificed and various tissues and serum collected for analyses. Comparison of H&E sections from normal spleens and spleens treated with agonists or antagonists of the invention identify the results of the activity of the agonists or antagonists on spleen cells, such as the diffusion of peri-arterial lymphatic sheaths, and/or significant increases in the nucleated cellularity of the red pulp regions, which may indicate the activation of the differentiation and proliferation of B-cell populations. Immunohistochemical studies using a B cell marker, anti-CD45R(B220), are used to determine whether any physiological changes to splenic cells, such as splenic disorganization, are due to increased B-cell representation within loosely defined B-cell zones that infiltrate established T-cell regions.

[1076] Flow cytometric analyses of the spleens from mice treated with agonist or antagonist is used to indicate whether the agonists or antagonists specifically increases the proportion of ThB+, CD45R(B220)dull B cells over that which is observed in control mice.

[1077] Likewise, a predicted consequence of increased mature B-cell representation in vivo is a relative increase in serum Ig titers. Accordingly, serum IgM and IgA levels are compared between buffer and agonists or antagonists-treated mice.

[1078] The studies described in this example tested activity of agonists or antagonists of the invention. However, one skilled in the art could easily modify the exemplified studies to test the activity of polynucleotides or polypeptides of the invention (e.g., gene therapy).

### Example 22

### T Cell Proliferation Assay

[1079] A CD3-induced proliferation assay is performed on PBMCs and is measured by the uptake of ³H-thymidine. The assay is performed as follows. Ninety-six well plates are coated with 100 μl/well of mAb to CD3 (HIT3a, Pharmingen) or isotype-matched control mAb (B33.1) overnight at 4 degrees C (1 μg/ml in 0.05M bicarbonate buffer, pH 9.5), then washed three times with PBS. PBMC are isolated by F/H gradient centrifugation from human peripheral blood and added to quadruplicate wells (5×10⁴/well) of mAb coated plates in RPMI containing 10% FCS and P/S in the presence of varying concentrations of agonists or antagonists of the invention (total volume 200 ul). Relevant protein buffer and medium alone are controls. After 48 hr. culture at 37 degrees C, plates are spun for 2 min. at 1000 rpm and 100 μl of supernatant is removed and stored −20 degrees C for measurement of IL-2 (or other cytokines) if effect on proliferation is observed. Wells are supplemented with 100 ul of medium containing 0.5 uCi of ³H-thymidine and cultured at 37 degrees C for 18-24 hr. Wells are harvested and incorporation of ³H-thymidine used as a measure of proliferation. Anti-CD3 alone is the positive control for proliferation. IL-2 (100 U/ml) is also used as a control which enhances proliferation. Control antibody which does not induce proliferation of T cells is used as the negative control for the effects of agonists or antagonists of the invention.

[1080] The studies described in this example tested activity of agonists or antagonists of the invention. However, one skilled in the art could easily modify the exemplified studies to test the activity of polynucleotides or polypeptides of the invention (e.g., gene therapy).

### Example 23

### Effect ofAgonists or Antagonists of the Invention on the Expression of MHC Class II, Costimulatory and Adhesion Molecules and Cell Differentiation of Monocytes and Monocyte-derived Human Dendritic Cells

[1081] Dendritic cells are generated by the expansion of proliferating precursors found in the peripheral blood: adherent PBMC or elutriated monocytic fractions are cultured for 7-10 days with GM-CSF (50 ng/ml) and IL-4 (20 ng/ml). These dendritic cells have the characteristic phenotype of immature cells (expression of CD1, CD80, CD86, CD40 and MHC class II antigens). Treatment with activating factors, such as TNF-α, causes a rapid change in surface phenotype (increased expression of MHC class I and II, costimulatory and adhesion molecules, downregulation of FCγRII, upregulation of CD83). These changes correlate with increased antigen-presenting capacity and with functional maturation of the dendritic cells.

[1082] FACS analysis of surface antigens is performed as follows. Cells are treated 1-3 days with increasing concentrations of agonist or antagonist of the invention or LPS (positive control), washed with PBS containing 1% BSA and 0.02 mM sodium azide, and then incubated with 1:20 dilution of appropriate FITC- or PE-labeled monoclonal antibodies for 30 minutes at 4 degrees C. After an additional wash, the labeled cells are analyzed by flow cytometry on a FACScan (Becton Dickinson).

[1083] Effect on the Production of Cytokines.

[1084] Cytokines generated by dendritic cells, in particular IL-12, are important in the initiation of T-cell dependent immune responses. IL-12 strongly influences the development of Thl helper T-cell immune response, and induces cytotoxic T and NK cell function. An ELISA is used to measure the IL-12 release as follows. Dendritic cells (10⁶/ml) are treated with increasing concentrations of agonists or antagonists of the invention for 24 hours. LPS (100 ng/ml) is added to the cell culture as positive control. Supernatants from the cell cultures are then collected and analyzed for IL-12 content using commercial ELISA kit (e.g., R & D Systems (Minneapolis, Minn.)). The standard protocols provided with the kits are used.

[1085] Effect on the Expression of MHC Class II, Costimulatory and Adhesion Molecules.

[1086] Three major families of cell surface antigens can be identified on monocytes: adhesion molecules, molecules involved in antigen presentation, and Fc receptor. Modulation of the expression of MHC class II antigens and other costimulatory molecules, such as B7 and ICAM-1, may result in changes in the antigen presenting capacity of monocytes and ability to induce T cell activation. Increased expression of Fc receptors may correlate with improved monocyte cytotoxic activity, cytokine release and phagocytosis.

[1087] FACS analysis is used to examine the surface antigens as follows. Monocytes are treated 1-5 days with increasing concentrations of agonists or antagonists of the invention or LPS (positive control), washed with PBS containing 1% BSA and 0.02 mM sodium azide, and then incubated with 1:20 dilution of appropriate FITC- or PE-labeled monoclonal antibodies for 30 minutes at 4 degrees C. After an additional wash, the labeled cells are analyzed by flow cytometry on a FACScan (Becton Dickinson).

[1088] Monocyte Activation and/or Increased Survival.

[1089] Assays for molecules that activate (or alternatively, inactivate) monocytes and/or increase monocyte survival (or alternatively, decrease monocyte survival) are known in the art and may routinely be applied to determine whether a molecule of the invention functions as an inhibitor or activator of monocytes. Agonists or antagonists of the invention can be screened using the three assays described below. For each of these assays, Peripheral blood mononuclear cells (PBMC) are purified from single donor leukopacks (American Red Cross, Baltimore, Md.) by centrifugation through a Histopaque gradient (Sigma). Monocytes are isolated from PBMC by counterflow centrifugal elutriation.

[1090] Monocyte Survival Assay.

[1091] Human peripheral blood monocytes progressively lose viability when cultured in absence of serum or other stimuli. Their death results from internally regulated processes (apoptosis). Addition to the culture of activating factors, such as TNF-alpha dramatically improves cell survival and prevents DNA fragmentation. Propidium iodide (PI) staining is used to measure apoptosis as follows. Monocytes are cultured for 48 hours in polypropylene tubes in serum-free medium (positive control), in the presence of 100 ng/ml TNF-alpha (negative control), and in the presence of varying concentrations of the compound to be tested. Cells are suspended at a concentration of 2×10⁶/ml in PBS containing PI at a final concentration of 5 μg/ml, and then incubated at room temperature for 5 minutes before FACScan analysis. PI uptake has been demonstrated to correlate with DNA fragmentation in this experimental paradigm.

[1092] Effect on Cytokine Release.

[1093] An important function of monocytes/macrophages is their regulatory activity on other cellular populations of the immune system through the release of cytokines after stimulation. An ELISA to measure cytokine release is performed as follows. Human monocytes are incubated at a density of 5×10⁵ cells/ml with increasing concentrations of agonists or antagonists of the invention and under the same conditions, but in the absence of agonists or antagonists. For IL-12 production, the cells are primed overnight with IFN (100 U/ml) in the presence of agonist or antagonist of the invention. LPS (10 ng/ml) is then added. Conditioned media are collected after 24 h and kept frozen until use. Measurement of TNF-alpha, IL-10, MCP-1 and IL-8 is then performed using a commercially available ELISA kit (e.g., R & D Systems (Minneapolis, Minn)) and applying the standard protocols provided with the kit.

[1094] Oxidative burst. Purified monocytes are plated in 96-w plate at 2-1×10⁵ cell/well. Increasing concentrations of agonists or antagonists of the invention are added to the wells in a total volume of 0.2 ml culture medium (RPMI 1640+10% FCS, glutamine and antibiotics). After 3 days incubation, the plates are centrifuged and the medium is removed from the wells. To the macrophage monolayers, 0.2 ml per well of phenol red solution (140 mM NaCl, 10 mM potassium phosphate buffer pH 7.0, 5.5 mM dextrose, 0.56 mM phenol red and 19 U/ml of HRPO) is added, together with the stimulant (200 nM PMA). The plates are incubated at 37° C. for 2 hours and the reaction is stopped by adding 20 μl 1N NaOH per well. The absorbance is read at 610 nm. To calculate the amount of H₂O₂ produced by the macrophages, a standard curve of a H₂O₂ solution of known molarity is performed for each experiment.

[1095] The studies described in this example tested activity of agonists or antagonists of the invention. However, one skilled in the art could easily modify the exemplified studies to test the activity of polynucleotides or polypeptides of the invention (e.g., gene therapy).

### Example 24

### Biological Effects of Agonists or Antagonists of the Invention

[1096] Astrocyte and Neuronal Assays

[1097] Agonists or antagonists of the invention, expressed in Escherichia coli and purified as described above, can be tested for activity in promoting the survival, neurite outgrowth, or phenotypic differentiation of cortical neuronal cells and for inducing the proliferation of glial fibrillary acidic protein immunopositive cells, astrocytes. The selection of cortical cells for the bioassay is based on the prevalent expression of FGF-1 and FGF-2 in cortical structures and on the previously reported enhancement of cortical neuronal survival resulting from FGF-2 treatment. A thymidine incorporation assay, for example, can be used to elucidate an agonist or antagonist of the invention's activity on these cells.

[1098] Moreover, previous reports describing the biological effects of FGF-2 (basic FGF) on cortical or hippocampal neurons in vitro have demonstrated increases in both neuron survival and neurite outgrowth (Walicke et al., “Fibroblast growth factor promotes survival of dissociated hippocampal neurons and enhances neurite extension.” Proc. Natl. Acad. Sci. USA 83:3012-3016. (1986), assay herein incorporated by reference in its entirety). However, reports from experiments done on PC-12 cells suggest that these two responses are not necessarily synonymous and may depend on not only which FGF is being tested but also on which receptor(s) are expressed on the target cells. Using the primary cortical neuronal culture paradigm, the ability of an agonist or antagonist of the invention to induce neurite outgrowth can be compared to the response achieved with FGF-2 using, for example, a thymidine incorporation assay.

[1099] Fibroblast and Endothelial Cell Assays

[1100] Human lung fibroblasts are obtained from Clonetics (San Diego, Calif.) and maintained in growth media from Clonetics. Dermal microvascular endothelial cells are obtained from Cell Applications (San Diego, Calif.). For proliferation assays, the human lung fibroblasts and dermal microvascular endothelial cells can be cultured at 5,000 cells/well in a 96-well plate for one day in growth medium. The cells are then incubated for one day in 0.1% BSA basal medium. After replacing the medium with fresh 0.1% BSA medium, the cells are incubated with the test proteins for 3 days. Alamar Blue (Alamar Biosciences, Sacramento, Calif.) is added to each well to a final concentration of 10%. The cells are incubated for 4 hr. Cell viability is measured by reading in a CytoFluor fluorescence reader. For the PGE₂ assays, the human lung fibroblasts are cultured at 5,000 cells/well in a 96-well plate for one day. After a medium change to 0.1% BSA basal medium, the cells are incubated with FGF-2 or agonists or antagonists of the invention with or without IL-1α for 24 hours. The supernatants are collected and assayed for PGE₂ by EIA kit (Cayman, Ann Arbor, Mich.). For the IL-6 assays, the human lung fibroblasts are cultured at 5,000 cells/well in a 96-well plate for one day. After a medium change to 0.1% BSA basal medium, the cells are incubated with FGF-2 or with or without agonists or antagonists of the invention IL-1α for 24 hours. The supernatants are collected and assayed for IL-6 by ELISA kit (Endogen, Cambridge, Mass.).

[1101] Human lung fibroblasts are cultured with FGF-2 or agonists or antagonists of the invention for 3 days in basal medium before the addition of Alamar Blue to assess effects on growth of the fibroblasts. FGF-2 should show a stimulation at 10 -2500 ng/ml which can be used to compare stimulation with agonists or antagonists of the invention.

[1102] Parkinson Models.

[1103] The loss of motor function in Parkinson's disease is attributed to a deficiency of striatal dopamine resulting from the degeneration of the nigrostriatal dopaminergic projection neurons. An animal model for Parkinson's that has been extensively characterized involves the systemic administration of 1-methyl-4 phenyl 1,2,3,6-tetrahydropyridine (MPTP). In the CNS, MPTP is taken-up by astrocytes and catabolized by monoamine oxidase B to 1-methyl-4-phenyl pyridine (MPP+) and released. Subsequently, MPP⁺ is actively accumulated in dopaminergic neurons by the high-affinity reuptake transporter for dopamine. MPP⁺ is then concentrated in mitochondria by the electrochemical gradient and selectively inhibits nicotidamide adenine disphosphate: ubiquinone oxidoreductionase (complex I), thereby interfering with electron transport and eventually generating oxygen radicals.

[1104] It has been demonstrated in tissue culture paradigms that FGF-2 (basic FGF) has trophic activity towards nigral dopaminergic neurons (Ferrari et al., Dev. Biol. 1989). Recently, Dr. Unsicker's group has demonstrated that administering FGF-2 in gel foam implants in the striatum results in the near complete protection of nigral dopaminergic neurons from the toxicity associated with MPTP exposure (Otto and Unsicker, J. Neuroscience, 1990).

[1105] Based on the data with FGF-2, agonists or antagonists of the invention can be evaluated to determine whether it has an action similar to that of FGF-2 in enhancing dopaminergic neuronal survival in vitro and it can also be tested in vivo for protection of dopaminergic neurons in the striatum from the damage associated with MPTP treatment. The potential effect of an agonist or antagonist of the invention is first examined in vitro in a dopaminergic neuronal cell culture paradigm. The cultures are prepared by dissecting the midbrain floor plate from gestation day 14 Wistar rat embryos. The tissue is dissociated with trypsin and seeded at a density of 200,000 cells/cm on polyorthinine-laminin coated glass coverslips. The cells are maintained in Dulbecco's Modified Eagle's medium and F12 medium containing hormonal supplements (N1). The cultures are fixed with paraformaldehyde after 8 days in vitro and are processed for tyrosine hydroxylase, a specific marker for dopaminergic neurons, immunohistochemical staining. Dissociated cell cultures are prepared from embryonic rats. The culture medium is changed every third day and the factors are also added at that time.

[1106] Since the dopaminergic neurons are isolated from animals at gestation day 14, a developmental time which is past the stage when the dopaminergic precursor cells are proliferating, an increase in the number of tyrosine hydroxylase immunopositive neurons would represent an increase in the number of dopaminergic neurons surviving in vitro. Therefore, if an agonist or antagonist of the invention acts to prolong the survival of dopaminergic neurons, it would suggest that the agonist or antagonist may be involved in Parkinson's Disease.

[1107] The studies described in this example tested activity of agonists or antagonists of the invention. However, one skilled in the art could easily modify the exemplified studies to test the activity of polynucleotides or polypeptides of the invention (e.g., gene therapy).

### Example 25

### The Effect ofAgonists or Antagonists of the Invention on the Growth of Vascular Endothelial Cells

[1108] On day 1, human umbilical vein endothelial cells (HUVEC) are seeded at 2-5×10⁴ cells/35 mm dish density in M199 medium containing 4% fetal bovine serum (FBS), 16 units/ml heparin, and 50 units/ml endothelial cell growth supplements (ECGS, Biotechnique, Inc.). On day 2, the medium is replaced with M199 containing 10% FBS, 8 units/ml heparin. An agonist or antagonist of the invention, and positive controls, such as VEGF and basic FGF (bFGF) are added, at varying concentrations. On days 4 and 6, the medium is replaced. On day 8, cell number is determined with a Coulter Counter.

[1109] An increase in the number of HUVEC cells indicates that the compound of the invention may proliferate vascular endothelial cells, while a decrease in the number of HUVEC cells indicates that the compound of the invention inhibits vascular endothelial cells.

[1110] The studies described in this example tested activity of a polypeptide of the invention. However, one skilled in the art could easily modify the exemplified studies to test the activity of polynucleotides (e.g., gene therapy), agonists, and/or antagonists of the invention.

### Example 26

### Rat Corneal Wound Healing Model

[1111] This animal model shows the effect of an agonist or antagonist of the invention on neovascularization. The experimental protocol includes:

[1112] a) Making a 1-1.5 mm long incision from the center of cornea into the stromal layer.

[1113] b) Inserting a spatula below the lip of the incision facing the outer corner of the eye.

[1114] c) Making a pocket (its base is 1-1.5 mm form the edge of the eye).

[1115] d) Positioning a pellet, containing 50 ng-5ug of an agonist or antagonist of the invention, within the pocket.

[1116] e) Treatment with an agonist or antagonist of the invention can also be applied topically to the comeal wounds in a dosage range of 20 mg-500 mg (daily treatment for five days).

[1117] The studies described in this example tested activity of agonists or antagonists of the invention. However, one skilled in the art could easily modify the exemplified studies to test the activity of polynucleotides or polypeptides of the invention (e.g., gene therapy).

### Example 27

### Diabetic Mouse and Glucocorticoid-impaired Wound Healing Models

[1118] Diabetic db+/db+ Mouse Model.

[1119] To demonstrate that an agonist or antagonist of the invention accelerates the healing process, the genetically diabetic mouse model of wound healing is used. The full thickness wound healing model in the db+/db+ mouse is a well characterized, clinically relevant and reproducible model of impaired wound healing. Healing of the diabetic wound is dependent on formation of granulation tissue and re-epithelialization rather than contraction (Gartner, M.H. et al., J. Surg. Res. 52:389 (1992); Greenhalgh, D.G. et al., Am. J. Pathol. 136:1235 (1990)).

[1120] The diabetic animals have many of the characteristic features observed in Type II diabetes mellitus. Homozygous (db+/db+) mice are obese in comparison to their normal heterozygous (db+/+m) littermates. Mutant diabetic (db+/db+) mice have a single autosomal recessive mutation on chromosome 4 (db+) (Coleman et al. Proc. Natl. Acad. Sci. USA 77:283-293 (1982)). Animals show polyphagia, polydipsia and polyuria. Mutant diabetic mice (db+/db+) have elevated blood glucose, increased or normal insulin levels, and suppressed cell-mediated immunity (Mandel et al., J. Immunol. 120:1375 (1978); Debray-Sachs, M. et al., Clin. Exp. Immunol. 51(1):1-7 (1983); Leiter et al., Am. J of Pathol. 114:46-55 (1985)). Peripheral neuropathy, myocardial complications, and microvascular lesions, basement membrane thickening and glomerular filtration abnormalities have been described in these animals (Norido, F. et al., Exp. Neurol. 83(2):221-232 (1984); Robertson et al., Diabetes 29(1):60-67 (1980); Giacomelli et al., Lab Invest. 40(4):460-473 (1979); Coleman, D. L., Diabetes 31 (Suppl):1-6 (1982)). These homozygous diabetic mice develop hyperglycemia that is resistant to insulin analogous to human type II diabetes (Mandel et al, J. Immunol. 120:1375-1377 (1978)).

[1121] The characteristics observed in these animals suggests that healing in this model may be similar to the healing observed in human diabetes (Greenhalgh, et al., Am. J. of Pathol. 136:1235-1246 (1990)).

[1122] Genetically diabetic female C57BL/KsJ (db+/db+) mice and their non-diabetic (db+/+m) heterozygous littermates are used in this study (Jackson Laboratories). The animals are purchased at 6 weeks of age and are 8 weeks old at the beginning of the study. Animals are individually housed and received food and water ad libitum. All manipulations are performed using aseptic techniques. The experiments are conducted according to the rules and guidelines of Human Genome Sciences, Inc. Institutional Animal Care and Use Committee and the Guidelines for the Care and Use of Laboratory Animals.

[1123] Wounding protocol is performed according to previously reported methods (Tsuboi, R. and Rifkin, D. B., J. Exp. Med. 172:245-251 (1990)). Briefly, on the day of wounding, animals are anesthetized with an intraperitoneal injection of Avertin (0.01 mg/mL), 2,2,2-tribromoethanol and 2-methyl-2-butanol dissolved in deionized water. The dorsal region of the animal is shaved and the skin washed with 70% ethanol solution and iodine. The surgical area is dried with sterile gauze prior to wounding. An 8 mm full-thickness wound is then created using a Keyes tissue punch. Immediately following wounding, the surrounding skin is gently stretched to eliminate wound expansion. The wounds are left open for the duration of the experiment. Application of the treatment is given topically for 5 consecutive days commencing on the day of wounding. Prior to treatment, wounds are gently cleansed with sterile saline and gauze sponges.

[1124] Wounds are visually examined and photographed at a fixed distance at the day of surgery and at two day intervals thereafter. Wound closure is determined by daily measurement on days 1-5 and on day 8. Wounds are measured horizontally and vertically using a calibrated Jameson caliper. Wounds are considered healed if granulation tissue is no longer visible and the wound is covered by a continuous epithelium.

[1125] An agonist or antagonist of the invention is administered using at a range different doses, from 4 mg to 500 mg per wound per day for 8 days in vehicle. Vehicle control groups received 50 mL of vehicle solution.

[1126] Animals are euthanized on day 8 with an intraperitoneal injection of sodium pentobarbital (300 mg/kg). The wounds and surrounding skin are then harvested for histology and immunohistochemistry. Tissue specimens are placed in 10% neutral buffered formalin in tissue cassettes between biopsy sponges for further processing.

[1127] Three groups of 10 animals each (5 diabetic and 5 non-diabetic controls) are evaluated: 1) Vehicle placebo control, 2) untreated group, and 3) treated group.

[1128] Wound closure is analyzed by measuring the area in the vertical and horizontal axis and obtaining the total square area of the wound. Contraction is then estimated by establishing the differences between the initial wound area (day 0) and that of post treatment (day 8). The wound area on day 1 is 64mm², the corresponding size of the dermal punch. Calculations are made using the following formula:

[Open area on day 8]−[Open area on day 1]/[Open area on day 1]

[1129] Specimens are fixed in 10% buffered formalin and paraffin embedded blocks are sectioned perpendicular to the wound surface (Smm) and cut using a Reichert-Jung microtome. Routine hematoxylin-eosin (H&E) staining is performed on cross-sections of bisected wounds. Histologic examination of the wounds are used to assess whether the healing process and the morphologic appearance of the repaired skin is altered by treatment with an agonist or antagonist of the invention. This assessment included verification of the presence of cell accumulation, inflammatory cells, capillaries, fibroblasts, re-epithelialization and epidermal maturity (Greenhalgh, D.G. et al., Am. J. Pathol. 136.1235 (1990)). A calibrated lens micrometer is used by a blinded observer.

[1130] Tissue sections are also stained immunohistochemically with a polyclonal rabbit anti-human keratin antibody using ABC Elite detection system. Human skin is used as a positive tissue control while non-immune IgG is used as a negative control. Keratinocyte growth is determined by evaluating the extent of reepithelialization of the wound using a calibrated lens micrometer.

[1131] Proliferating cell nuclear antigen/cyclin (PCNA) in skin specimens is demonstrated by using anti-PCNA antibody (1:50) with an ABC Elite detection system. Human colon cancer served as a positive tissue control and human brain tissue is used as a negative tissue control. Each specimen included a section with omission of the primary antibody and substitution with non-immune mouse IgG. Ranking of these sections is based on the extent of proliferation on a scale of 0-8, the lower side of the scale reflecting slight proliferation to the higher side reflecting intense proliferation.

[1132] Experimental data are analyzed using an unpaired t test. A p value of <0.05 is considered significant.

[1133] Steroid Impaired Rat Model

[1134] The inhibition of wound healing by steroids has been well documented in various in vitro and in vivo systems (Wahl, Glucocorticoids and Wound healing. In: Anti-Inflammatory Steroid Action: Basic and Clinical Aspects. 280-302 (1989); Wahlet al., J. Immunol. 115: 476-481 (1975); Werb et al., J. Exp. Med. 147:1684-1694 (1978)). Glucocorticoids retard wound healing by inhibiting angiogenesis, decreasing vascular permeability (Ebert et al., An. Intern. Med. 37:701-705 (1952)), fibroblast proliferation, and collagen synthesis (Beck et al., Growth Factors. 5: 295-304 (1991); Haynes et al., J. Clin. Invest. 61: 703-797 (1978)) and producing a transient reduction of circulating monocytes (Haynes et al., J. Clin. Invest. 61: 703-797 (1978); Wahl, “Glucocorticoids and wound healing”, In: Anti-inflammatory Steroid Action: Basic and Clinical Aspects, Academic Press, New York, pp. 280-302 (1989)). The systemic administration of steroids to impaired wound healing is a well establish phenomenon in rats (Beck et al., Growth Factors. 5: 295-304 (1991); Haynes et al., J. Clin. Invest. 61: 703-797 (1978); Wahl, “Glucocorticoids and wound healing”, In: Anti-inflammatory Steroid Action: Basic and Clinical Aspects, Academic Press, New York, pp. 280-302 (1989); Pierce et al., Proc. Nati. Acad. Sci. USA 86: 2229-2233 (1989)).

[1135] To demonstrate that an agonist or antagonist of the invention can accelerate the healing process, the effects of multiple topical applications of the agonist or antagonist on full thickness excisional skin wounds in rats in which healing has been impaired by the systemic administration of methylprednisolone is assessed.

[1136] Young adult male Sprague Dawley rats weighing 250-300 g (Charles River Laboratories) are used in this example. The animals are purchased at 8 weeks of age and are 9 weeks old at the beginning of the study. The healing response of rats is impaired by the systemic administration of methylprednisolone (17 mg/kg/rat intramuscularly) at the time of wounding. Animals are individually housed and received food and water ad libitum. All manipulations are performed using aseptic techniques. This study is conducted according to the rules and guidelines of Human Genome Sciences, Inc. Institutional Animal Care and Use Committee and the Guidelines for the Care and Use of Laboratory Animals.

[1137] The wounding protocol is followed according to section A, above. On the day of wounding, animals are anesthetized with an intramuscular injection of ketamine (50 mg/kg) and xylazine (5 mg/kg). The dorsal region of the animal is shaved and the skin washed with 70% ethanol and iodine solutions. The surgical area is dried with sterile gauze prior to wounding. An 8 mm full-thickness wound is created using a Keyes tissue punch. The wounds are left open for the duration of the experiment. Applications of the testing materials are given topically once a day for 7 consecutive days commencing on the day of wounding and subsequent to methylprednisolone administration. Prior to treatment, wounds are gently cleansed with sterile saline and gauze sponges.

[1138] Wounds are visually examined and photographed at a fixed distance at the day of wounding and at the end of treatment. Wound closure is determined by daily measurement on days 1-5 and on day 8. Wounds are measured horizontally and vertically using a calibrated Jameson caliper. Wounds are considered healed if granulation tissue is no longer visible and the wound is covered by a continuous epithelium.

[1139] The agonist or antagonist of the invention is administered using at a range different doses, from 4 mg to 500 mg per wound per day for 8 days in vehicle. Vehicle control groups received 50 mL of vehicle solution.

[1140] Animals are euthanized on day 8 with an intraperitoneal injection of sodium pentobarbital (300 mg/kg). The wounds and surrounding skin are then harvested for histology. Tissue specimens are placed in 10% neutral buffered formalin in tissue cassettes between biopsy sponges for further processing.

[1141] Three groups of 10 animals each (5 with methylprednisolone and 5 without glucocorticoid) are evaluated: 1) Untreated group 2) Vehicle placebo control 3) treated groups.

[1142] Wound closure is analyzed by measuring the area in the vertical and horizontal axis and obtaining the total area of the wound. Closure is then estimated by establishing the differences between the initial wound area (day 0) and that of post treatment (day 8). The wound area on day 1 is 64mm², the corresponding size of the dermal punch. Calculations are made using the following formula:

[Open area on day 8]−[Open area on day 1]/[Open area on day 1]

[1143] Specimens are fixed in 10% buffered formalin and paraffin embedded blocks are sectioned perpendicular to the wound surface (5mm) and cut using an Olympus microtome. Routine hematoxylin-eosin (H&E) staining is performed on cross-sections of bisected wounds. Histologic examination of the wounds allows assessment of whether the healing process and the morphologic appearance of the repaired skin is improved by treatment with an agonist or antagonist of the invention. A calibrated lens micrometer is used by a blinded observer to determine the distance of the wound gap.

[1144] Experimental data are analyzed using an unpaired t test. A p value of <0.05 is considered significant.

[1145] The studies described in this example tested activity of agonists or antagonists of the invention. However, one skilled in the art could easily modify the exemplified studies to test the activity of polynucleotides or polypeptides of the invention (e.g., gene therapy).

### Example 28

### Lymphadema Animal Model

[1146] The purpose of this experimental approach is to create an appropriate and consistent lymphedema model for testing the therapeutic effects of an agonist or antagonist of the invention in lymphangiogenesis and re-establishment of the lymphatic circulatory system in the rat hind limb. Effectiveness is measured by swelling volume of the affected limb, quantification of the amount of lymphatic vasculature, total blood plasma protein, and histopathology. Acute lymphedema is observed for 7-10 days. Perhaps more importantly, the chronic progress of the edema is followed for up to 3-4 weeks.

[1147] Prior to beginning surgery, blood sample is drawn for protein concentration analysis. Male rats weighing approximately ˜350g are dosed with Pentobarbital. Subsequently, the right legs are shaved from knee to hip. The shaved area is swabbed with gauze soaked in 70% EtOH. Blood is drawn for serum total protein testing. Circumference and volumetric measurements are made prior to injecting dye into paws after marking 2 measurement levels (0.5 cm above heel, at mid-pt of dorsal paw). The intradermal dorsum of both right and left paws are injected with 0.05 ml of 1% Evan's Blue. Circumference and volumetric measurements are then made following injection of dye into paws.

[1148] Using the knee joint as a landmark, a mid-leg inguinal incision is made circumferentially allowing the femoral vessels to be located. Forceps and hemostats are used to dissect and separate the skin flaps. After locating the femoral vessels, the lymphatic vessel that runs along side and underneath the vessel(s) is located. The main lymphatic vessels in this area are then electrically coagulated or suture ligated.

[1149] Using a microscope, muscles in back of the leg (near the semitendinosis and adductors) are bluntly dissected. The popliteal lymph node is then located. The 2 proximal and 2 distal lymphatic vessels and distal blood supply of the popliteal node are then ligated by suturing. The popliteal lymph node, and any accompanying adipose tissue, is then removed by cutting connective tissues.

[1150] Care is taken to control any mild bleeding resulting from this procedure. After lymphatics are occluded, the skin flaps are sealed by using liquid skin (Vetbond) (AJ Buck). The separated skin edges are sealed to the underlying muscle tissue while leaving a gap of 0.5 cm around the leg. Skin also may be anchored by suturing to underlying muscle when necessary.

[1151] To avoid infection, animals are housed individually with mesh (no bedding). Recovering animals are checked daily through the optimal edematous peak, which typically occurred by day 5-7. The plateau edematous peak are then observed. To evaluate the intensity of the lymphedema, the circumference and volumes of 2 designated places on each paw before operation and daily for 7 days are measured. The effect of plasma proteins on lymphedema is determined and whether protein analysis is a useful testing perimeter is also investigated. The weights of both control and edematous limbs are evaluated at 2 places. Analysis is performed in a blind manner.

[1152] Circumference Measurements: Under brief gas anesthetic to prevent limb movement, a cloth tape is used to measure limb circumference. Measurements are done at the ankle bone and dorsal paw by 2 different people and those 2 readings are averaged. Readings are taken from both control and edematous limbs.

[1153] Volumetric Measurements: On the day of surgery, animals are anesthetized with Pentobarbital and are tested prior to surgery. For daily volumetrics animals are under brief halothane anesthetic (rapid immobilization and quick recovery), and both legs are shaved and equally marked using waterproof marker on legs. Legs are first dipped in water, then dipped into instrument to each marked level then measured by Buxco edema software(Chen/Victor). Data is recorded by one person, while the other is dipping the limb to marked area.

[1154] Blood-plasma protein measurements: Blood is drawn, spun, and serum separated prior to surgery and then at conclusion for total protein and Ca2⁺ comparison.

[1155] Limb Weight Comparison: After drawing blood, the animal is prepared for tissue collection. The limbs are amputated using a quillitine, then both experimental and control legs are cut at the ligature and weighed. A second weighing is done as the tibio-cacaneal joint is disarticulated and the foot is weighed.

[1156] Histological Preparations: The transverse muscle located behind the knee (popliteal) area is dissected and arranged in a metal mold, filled with freezeGel, dipped into cold methylbutane, placed into labeled sample bags at −80EC until sectioning. Upon sectioning, the muscle is observed under fluorescent microscopy for lymphatics.

[1157] The studies described in this example tested activity of agonists or antagonists of the invention. However, one skilled in the art could easily modify the exemplified studies to test the activity of polynucleotides or polypeptides of the invention (e.g., gene therapy).

### Example 29

### Suppression of TNF Alpha-induced Adhesion Molecule Expression by an Agonist or Antagonist of the Invention

[1158] The recruitment of lymphocytes to areas of inflammation and angiogenesis involves specific receptor-ligand interactions between cell surface adhesion molecules (CAMs) on lymphocytes and the vascular endothelium. The adhesion process, in both normal and pathological settings, follows a multi-step cascade that involves intercellular adhesion molecule-1 (ICAM-1), vascular cell adhesion molecule-l (VCAM-1), and endothelial leukocyte adhesion molecule-1 (E-selectin) expression on endothelial cells (EC). The expression of these molecules and others on the vascular endothelium determines the efficiency with which leukocytes may adhere to the local vasculature and extravasate into the local tissue during the development of an inflammatory response. The local concentration of cytokines and growth factor participate in the modulation of the expression of these CAMs.

[1159] Tumor necrosis factor alpha (TNF-a), a potent proinflammatory cytokine, is a stimulator of all three CAMs on endothelial cells and may be involved in a wide variety of inflammatory responses, often resulting in a pathological outcome.

[1160] The potential of an agonist or antagonist of the invention to mediate a suppression of TNF-a induced CAM expression can be examined. A modified ELISA assay which uses ECs as a solid phase absorbent is employed to measure the amount of CAM expression on TNF-a treated ECs when co-stimulated with a member of the FGF family of proteins.

[1161] To perform the experiment, human umbilical vein endothelial cell (HUVEC) cultures are obtained from pooled cord harvests and maintained in growth medium (EGM-2; Clonetics, San Diego, Calif.) supplemented with 10% FCS and 1% penicillin/streptomycin in a 37 degree C. humidified incubator containing 5% CO₂.HUVECs are seeded in 96-well plates at concentrations of 1×104 cells/well in EGM medium at 37 degree C. for 18-24 hrs or until confluent. The monolayers are subsequently washed 3 times with a serum-free solution of RPMI-1640 supplemented with 100 U/ml penicillin and 100 mg/ml streptomycin, and treated with a given cytokine and/or growth factor(s) for 24 h at 37 degree C. Following incubation, the cells are then evaluated for CAM expression.

[1162] Human Umbilical Vein Endothelial cells (HUVECs) are grown in a standard 96 well plate to confluence. Growth medium is removed from the cells and replaced with 90 ul of 199 Medium (10% FBS). Samples for testing and positive or negative controls are added to the plate in triplicate (in 10 ul volumes). Plates are incubated at 37 degree C. for either 5 h (selectin and integrin expression) or 24 h (integrin expression only). Plates are aspirated to remove medium and 100 μl of 0.1% paraformaldehyde-PBS(with Ca++and Mg++) is added to each well. Plates are held at 4° C. for 30 min.

[1163] Fixative is then removed from the wells and wells are washed 1× with PBS(+Ca,Mg)+0.5% BSA and drained. Do not allow the wells to dry. Add 10 μl of diluted primary antibody to the test and control wells. Anti-ICAM-1 -Biotin, Anti-VCAM-1-Biotin and Anti-E-selectin-Biotin are used at a concentration of 10 μg/ml (1:10 dilution of 0.1 mg/ml stock antibody). Cells are incubated at 37° C. for 30 min. in a humidified environment. Wells are washed X3 with PBS(+Ca,Mg)+0.5% BSA.

[1164] Then add 20 μl of diluted ExtrAvidin-Alkaline Phosphotase (1:5,000 dilution) to each well and incubated at 37° C. for 30 min. Wells are washed X3 with PBS(+Ca,Mg)+0.5% BSA. 1 tablet of p-Nitrophenol Phosphate pNPP is dissolved in 5 ml of glycine buffer (pH 10.4). 100 μl of pNPP substrate in glycine buffer is added to each test well. Standard wells in triplicate are prepared from the working dilution of the ExtrAvidin-Alkaline Phosphotase in glycine buffer: 1:5,000 (10⁰)>10^{-0.5}>10⁻¹>10^{-1.5} 0.5 μl of each dilution is added to triplicate wells and the resulting AP content in each well is 5.50 ng, 1.74 ng, 0.55 ng, 0.18 ng. 100 μl of pNNP reagent must then be added to each of the standard wells. The plate must be incubated at 37° C. for 4 h. A volume of 50 μl of 3M NaOH is added to all wells. The results are quantified on a plate reader at 405 nm. The background subtraction option is used on blank wells filled with glycine buffer only. The template is set up to indicate the concentration of AP-conjugate in each standard well [ 5.50 ng; 1.74 ng; 0.55 ng; 0.18 ng]. Results are indicated as amount of bound AP-conjugate in each sample.

[1165] The studies described in this example tested activity of agonists or antagonists of the invention. However, one skilled in the art could easily modify the exemplified studies to test the activity of polynucleotides or polypeptides of the invention (e.g., gene therapy).

### Example 30

### Production of Polypeptide of the Invention For High-throughput Screening Assays

[1166] The following protocol produces a supernatant containing polypeptide of the present invention to be tested. This supernatant can then be used in the Screening Assays described in Examples 32-41.

[1167] First, dilute Poly-D-Lysine (644 587 Boehringer-Mannheim) stock solution (lmg/ml in PBS) 1:20 in PBS (w/o calcium or magnesium 17-516F Biowhittaker) for a working solution of 50ug/ml. Add 200 ul of this solution to each well (24 well plates) and incubate at RT for 20 minutes. Be sure to distribute the solution over each well (note: a 12-channel pipetter may be used with tips on every other channel). Aspirate off the Poly-D-Lysine solution and rinse with lml PBS (Phosphate Buffered Saline). The PBS should remain in the well until just prior to plating the cells and plates may be poly-lysine coated in advance for up to two weeks.

[1168] Plate 293T cells (do not carry cells past P+20) at 2×10⁵ cells/well in 0.5 ml DMEM(Dulbecco's Modified Eagle Medium)(with 4.5 G/L glucose and L-glutamine (12-604F Biowhittaker))/10% heat inactivated FBS(14-503F Biowhittaker)/1× Penstrep(17-602E Biowhittaker). Let the cells grow overnight.

[1169] The next day, mix together in a sterile solution basin: 300 ul Lipofectamine (18324-012 Gibco/BRL) and 5 ml Optimem 1 (31985070 Gibco/BRL)/96-well plate. With a small volume multi-channel pipetter, aliquot approximately 2 ug of an expression vector containing a polynucleotide insert, produced by the methods described in Examples 8-10, into an appropriately labeled 96-well round bottom plate. With a multi-channel pipetter, add 50ul of the Lipofectamine/Optimem I mixture to each well. Pipette up and down gently to mix. Incubate at RT 15-45 minutes. After about 20 minutes, use a multi-channel pipetter to add 150 ul Optimem I to each well. As a control, one plate of vector DNA lacking an insert should be transfected with each set of transfections.

[1170] Preferably, the transfection should be performed by tag-teaming the following tasks. By tag-teaming, hands on time is cut in half, and the cells do not spend too much time on PBS. First, person A aspirates off the media from four 24-well plates of cells, and then person B rinses each well with 0.5-1 ml PBS. Person A then aspirates off PBS rinse, and person B, using a 12-channel pipetter with tips on every other channel, adds the 200ul of DNA/Lipofectamine/Optimem I complex to the odd wells first, then to the even wells, to each row on the 24-well plates. Incubate at 37 degree C. for 6 hours.

[1171] While cells are incubating, prepare appropriate media, either 1% BSA in DMEM with 1× penstrep, or HGS CHO-5 media (116.6 mg/L of CaCl2 (anhyd); 0.00130 mg/L CuSO₄-5H₂O; 0.050 mg/L of Fe(NO₃)₃-9H₂O; 0.417 mg/L of FeSO₄-7H₂O; 311.80 mg/L of Kcl; 28.64 mg/L of MgCl₂; 48.84 mg/L of MgSO₄; 6995.50 mg/L of NaCl; 2400.0 mg/L of NaHCO₃; 62.50 mg/L of NaH₂PO₄-H₂O; 71.02 mg/L of Na₂HPO4; 0.4320 mg/L of ZnSO₄-7H₂O; 0.002 mg/L of Arachidonic Acid; 1.022 mg/L of Cholesterol; 0.070 mg/L of DL-alpha-Tocopherol-Acetate; 0.0520 mg/L of Linoleic Acid; 0.010 mg/L of Linolenic Acid; 0.010 mg/L of Myristic Acid; 0.010 mg/L of Oleic Acid; 0.010 mg/L of Palmitric Acid; 0.010 mg/L of Palmitic Acid; 100 mg/L of Pluronic F-68; 0.010 mg/L of Stearic Acid; 2.20 mg/L of Tween 80; 4551 mg/L of D-Glucose; 130.85 mg/ml of L-Alanine; 147.50 mg/ml of L-Arginine-HCL; 7.50 mg/ml of L-Asparagine-H₂O; 6.65 mg/ml of L-Aspartic Acid; 29.56 mg/ml of L-Cystine-2HCL-H₂O; 31.29 mg/ml of L-Cystine-2HCL; 7.35 mg/ml of L-Glutamic Acid; 365.0 mg/ml of L-Glutamine; 18.75 mg/ml of Glycine; 52.48 mg/ml of L-Histidine-HCL-H₂O; 106.97 mg/ml of L-Isoleucine; 111.45 mg/ml of L-Leucine; 163.75 mg/ml of L-Lysine HCL; 32.34 mg/ml of L-Methionine; 68.48 mg/ml of L-Phenylalainine; 40.0 mg/ml of L-Proline; 26.25 mg/ml of L-Serine; 101.05 mg/ml of L-Threonine; 19.22 mg/ml of L-Tryptophan; 91.79 mg/ml of L-Tryrosine-2Na-2H₂O; and 99.65 mg/ml of L-Valine; 0.0035 mg/L of Biotin; 3.24 mg/L of D-Ca Pantothenate; 11.78 mg/L of Choline Chloride; 4.65 mg/L of Folic Acid; 15.60 mg/L of i-Inositol; 3.02 mg/L of Niacinamide; 3.00 mg/L of Pyridoxal HCL; 0.031 mg/L of Pyridoxine HCL; 0.319 mg/L of Riboflavin; 3.17 mg/L of Thiamine HCL; 0.365 mg/L of Thymidine; 0.680 mg/L of Vitamin B₁₂; 25 mM of HEPES Buffer; 2.39 mg/L of Na Hypoxanthine; 0.105 mg/L of Lipoic Acid; 0.081 mg/L of Sodium Putrescine-2HCL; 55.0 mg/L of Sodium Pyruvate; 0.0067 mg/L of Sodium Selenite; 2OuM of Ethanolamine; 0.122 mg/L of Ferric Citrate; 41.70 mg/L of Methyl-B-Cyclodextrin complexed with Linoleic Acid; 33.33 mg/L of Methyl-B-Cyclodextrin complexed with Oleic Acid; 10 mg/L of Methyl-B-Cyclodextrin complexed with Retinal Acetate. Adjust osmolarity to 327 mOsm) with 2mm glutamine and lx penstrep. (BSA (81-068-3 Bayer) lOOgm dissolved in IL DMEM for a 10% BSA stock solution). Filter the media and collect 50 ul for endotoxin assay in 15 ml polystyrene conical.

[1172] The transfection reaction is terminated, preferably by tag-teaming, at the end of the incubation period. Person A aspirates off the transfection media, while person B adds 1.5 ml appropriate media to each well. Incubate at 37 degree C. for 45 or 72 hours depending on the media used: 1% BSA for 45 hours or CHO-5 for 72 hours.

[1173] On day four, using a 300ul multichannel pipetter, aliquot 600ul in one Iml deep well plate and the remaining supernatant into a 2 ml deep well. The supernatants from each well can then be used in the assays described in Examples 32-39.

[1174] It is specifically understood that when activity is obtained in any of the assays described below using a supernatant, the activity originates from either the polypeptide of the present invention directly (e.g., as a secreted protein) or by polypeptide of the present invention inducing expression of other proteins, which are then secreted into the supernatant. Thus, the invention further provides a method of identifying the protein in the supernatant characterized by an activity in a particular assay.

### Example 31

### Construction of GAS Reporter Construct

[1175] One signal transduction pathway involved in the differentiation and proliferation of cells is called the Jaks-STATs pathway. Activated proteins in the Jaks-STATs pathway bind to gamma activation site “GAS” elements or interferon-sensitive responsive element (“ISRE”), located in the promoter of many genes. The binding of a protein to these elements alter the expression of the associated gene.

[1176] GAS and ISRE elements are recognized by a class of transcription factors called Signal Transducers and Activators of Transcription, or “STATs.” There are six members of the STATs family. Statl and Stat3 are present in many cell types, as is Stat2 (as response to IFN-alpha is widespread). Stat4 is more restricted and is not in many cell types though it has been found in T helper class I, cells after treatment with IL-12. Stat5 was originally called mammary growth factor, but has been found at higher concentrations in other cells including myeloid cells. It can be activated in tissue culture cells by many cytokines.

[1177] The STATs are activated to translocate from the cytoplasm to the nucleus upon tyrosine phosphorylation by a set of kinases known as the Janus Kinase (“Jaks”) family. Jaks represent a distinct family of soluble tyrosine kinases and include Tyk2, Jakl, Jak2, and Jak3. These kinases display significant sequence similarity and are generally catalytically inactive in resting cells.

[1178] The Jaks are activated by a wide range of receptors summarized in the Table below. (Adapted from review by Schidler and Darnell, Ann. Rev. Biochem. 64:621-51 (1995)). A cytokine receptor family, capable of activating Jaks, is divided into two groups: (a) Class 1 includes receptors for IL-2, IL-3, IL-4, IL-6, IL-7, IL-9, IL-11, IL-12, IL-15, Epo, PRL, GH, G-CSF, GM-CSF, LIF, CNTF, and thrombopoietin; and (b) Class 2 includes IFN-a, IFN-g, and IL-10. The Class 1 receptors share a conserved cysteine motif (a set of four conserved cysteines and one tryptophan) and a WSXWS motif (a membrane proximal region encoding Trp-Ser-Xaa-Trp-Ser (SEQ ID NO: 2)).

[1179] Thus, on binding of a ligand to a receptor, Jaks are activated, which in turn activate STATs, which then translocate and bind to GAS elements. This entire process is encompassed in the Jaks-STATs signal transduction pathway. Therefore, activation of the Jaks-STATs pathway, reflected by the binding of the GAS or the ISRE element, can be used to indicate proteins involved in the proliferation and differentiation of cells. For example, growth factors and cytokines are known to activate the Jaks-STATs pathway (See Table below). Thus, by using GAS elements linked to reporter molecules, activators of the Jaks-STATs pathway can be identified.

| | | | | | | GAS |
|---|---|---|---|---|---|---|
| | | | | | | (ele- |
| | JAKs | | | | | ments) |
| Ligand | tyk2 | Jak1 | Jak2 | Jak3 | STATS | or ISRE |
| IFN family | | | | | | |
| IFN-a/B | + | + | − | − | 1, 2, 3 | ISRE |
| IFN-g | | + | + | − | 1 | GAS |
| | | | | | | (IRF1 > |
| | | | | | | Lys6 > |
| | | | | | | IFP) |
| I1-10 | + | ? | ? | − | 1, 3 | |
| gp130 family | | | | | | |
| IL-6 | + | + | + | ? | 1, 3 | GAS |
| (Pleiotropic) | | | | | | (IRF1 > |
| | | | | | | Lys6 > |
| | | | | | | IFP) |
| I1-11 | ? | + | ? | ? | 1, 3 | |
| (Pleiotropic) | | | | | | |
| OnM | ? | + | + | ? | 1, 3 | |
| (Pleiotropic) | | | | | | |
| LIF | ? | + | + | ? | 1, 3 | |
| (Pleiotropic) | | | | | | |
| CNTF | −/+ | + | + | ? | 1, 3 | |
| (Pleiotropic) | | | | | | |
| G-CSF | ? | + | ? | ? | 1, 3 | |
| (Pleiotropic) | | | | | | |
| IL-12 | + | − | + | + | 1, 3 | |
| (Pleiotropic) | | | | | | |
| g-C family | | | | | | |
| IL-2 | − | + | − | + | 1, 3, 5 | GAS |
| (lymphocytes) | | | | | | |
| IL-4 | − | + | − | + | 6 | GAS |
| (lymph/myeloid) | | | | | | (IRF1 = |
| | | | | | | IFP >> |
| | | | | | | Ly6)(IgH) |
| IL-7 | − | + | − | + | 5 | GAS |
| (lymphocytes) | | | | | | |
| IL-9 | − | + | − | + | 5 | GAS |
| (lymphocytes) | | | | | | |
| IL-13 | − | + | ? | ? | 6 | GAS |
| (lymphocyte) | | | | | | |
| IL-15 | ? | + | ? | + | 5 | GAS |
| gpl40 family | | | | | | |
| IL-3 | − | − | + | − | 5 | GAS |
| (myeloid) | | | | | | (IRF1 > |
| | | | | | | IFP >> |
| | | | | | | Ly6) |
| IL-5 | − | − | + | − | 5 | GAS |
| (myeloid) | | | | | | |
| GM-CSF | − | − | + | − | 5 | GAS |
| (myeloid) | | | | | | |
| Growth hormone | | | | | | |
| family | | | | | | |
| GH | ? | − | + | − | 5 | |
| PRL | ? | +/− | + | − | 1, 3, 5 | |
| EPO | ? | − | + | − | 5 | GAS |
| | | | | | | (B-CAS > |
| | | | | | | IRF1 = |
| | | | | | | IFP >> Ly6) |
| Receptor | | | | | | |
| Tyrosine Kinases | | | | | | |
| EGF | ? | + | + | − | 1, 3 | GAS |
| | | | | | | (IRF1) |
| PDGF | ? | + | + | − | 1, 3 | |
| CSF-1 | ? | + | + | − | 1, 3 | GAS |
| | | | | | | (not IRF1) |

[1180] To construct a synthetic GAS containing promoter element, which is used in the Biological Assays described in Examples 32-33, a PCR based strategy is employed to generate a GAS-SV40 promoter sequence. The 5′ primer contains four tandem copies of the GAS binding site found in the IRFI promoter and previously demonstrated to bind STATs upon induction with a range of cytokines (Rothman et al., Immunity 1:457-468 (1994).), although other GAS or ISRE elements can be used instead. The 5′ primer also contains 1 8bp of sequence complementary to the SV40 early promoter sequence and is flanked with an XhoI site. The sequence of the 5′ primer is:

| | |
|---|---|
| 5’:GCGCCTCGAGATTTCCCCGAAATCTAGATTTCCCCGAAATGATTTCCCCGAAAT | (SEQ ID NO: 3) |
| GATTTCCCCGAAATATCTGCCATCTCAATTAG:3’ | |

[1181] The downstream primer is complementary to the SV40 promoter and is flanked with a Hind III site: 5′:GCGGCAAGCTTTTTGCAAAGCCTAGGC:3′ (SEQ ID NO: 4)

[1182] PCR amplification is performed using the SV40 promoter template present in the B-gal:promoter plasmid obtained from Clontech. The resulting PCR fragment is digested with XholI/Hind III and subcloned into BLSK2-. (Stratagene.) Sequencing with forward and reverse primers confirms that the insert contains the following sequence:

| | |
|---|---|
| 5’:CTCGAGATTTCCCCGAAATCTAGATTTCCCCGAAATGATTTCCCCGAAATGATT | (SEQ ID NO: 5) |
| TCCCCGAAATATCTGCCATCTCAATTAGTCAGCAACCATAGTCCCGCCCCTAACT | |
| CCGCCCATCCCGCCCCTAACTCCGCCCAGTTCCGCCCATTCTCCGCCCCATGGCTG | |
| ACTAATTTTTTTTATTTATGCAGAGGCCGAGGCCGCCTCGGCCTCTGAGCTATTCC | |
| AGAAGTAGTGAGGAGGCTTTTTTGGAGGCCTAGGCTTTTGCAAAAAGCTT:3’ | |

[1183] With this GAS promoter element linked to the SV40 promoter, a GAS:SEAP2 reporter construct is next engineered. Here, the reporter molecule is a secreted alkaline phosphatase, or “SEAP.” Clearly, however, any reporter molecule can be instead of SEAP, in this or in any of the other Examples. Well known reporter molecules that can be used instead of SEAP include chloramphenicol acetyltransferase (CAT), luciferase, alkaline phosphatase, B-galactosidase, green fluorescent protein (GFP), or any protein detectable by an antibody.

[1184] The above sequence confirmed synthetic GAS-SV40 promoter element is subcloned into the pSEAP-Promoter vector obtained from Clontech using HindII and XhoI, effectively replacing the SV40 promoter with the amplified GAS:SV40 promoter element, to create the GAS-SEAP vector. However, this vector does not contain a neomycin resistance gene, and therefore, is not preferred for mammalian expression systems.

[1185] Thus, in order to generate mammalian stable cell lines expressing the GAS-SEAP reporter, the GAS-SEAP cassette is removed from the GAS-SEAP vector using SalI and NotI, and inserted into a backbone vector containing the neomycin resistance gene, such as pGFP-l (Clontech), using these restriction sites in the multiple cloning site, to create the GAS-SEAP/Neo vector. Once this vector is transfected into mammalian cells, this vector can then be used as a reporter molecule for GAS binding as described in Examples 32-33.

[1186] Other constructs can be made using the above description and replacing GAS with a different promoter sequence. For example, construction of reporter molecules containing EGR and NF-KB promoter sequences are described in Examples 34 and 35. However, many other promoters can be substituted using the protocols described in these Examples. For instance, SRE, IL-2, NFAT, or Osteocalcin promoters can be substituted, alone or in combination (e.g., GAS/NF-KB/EGR, GAS/NF-KB, 1l-2/NFAT, or NF-KB/GAS). Similarly, other cell lines can be used to test reporter construct activity, such as HELA (epithelial), HUVEC (endothelial), Reh (B-cell), Saos-2 (osteoblast), HUVAC (aortic), or Cardiomyocyte.

### Example 32

### High-throughput Screening Assay for T-cell Activity.

[1187] The following protocol is used to assess T-cell activity by identifying factors, and determining whether supemate containing a polypeptide of the invention proliferates and/or differentiates T-cells. T-cell activity is assessed using the GAS/SEAP/Neo construct produced in Example 31. Thus, factors that increase SEAP activity indicate the ability to activate the Jaks-STATS signal transduction pathway. The T-cell used in this assay is Jurkat T-cells (ATCC Accession No. TIB-152), although Molt-3 cells (ATCC Accession No. CRL-1552) and Molt-4 cells (ATCC Accession No. CRL-1582) cells can also be used.

[1188] Jurkat T-cells are lymphoblastic CD4+ Thl helper cells. In order to generate stable cell lines, approximately 2 million Jurkat cells are transfected with the GAS-SEAP/neo vector using DMRIE-C (Life Technologies)(transfection procedure described below). The transfected cells are seeded to a density of approximately 20,000 cells per well and transfectants resistant to 1 mg/ml genticin selected. Resistant colonies are expanded and then tested for their response to increasing concentrations of interferon gamma. The dose response of a selected clone is demonstrated.

[1189] Specifically, the following protocol will yield sufficient cells for 75 wells containing 200 ul of cells. Thus, it is either scaled up, or performed in multiple to generate sufficient cells for multiple 96 well plates. Jurkat cells are maintained in RPMI+10% serum with 1% Pen-Strep. Combine 2.5 mls of OPTI-MEM (Life Technologies) with 10 ug of plasmid DNA in a T25 flask. Add 2.5 ml OPTI-MEM containing 50 ul of DMRIE-C and incubate at room temperature for 15-45 mins.

[1190] During the incubation period, count cell concentration, spin down the required number of cells (107 per transfection), and resuspend in OPTI-MEM to a final concentration of 10⁷ cells/ml. Then add lml of 1×10⁷ cells in OPTI-MEM to T25 flask and incubate at 37 degree C. for 6 hrs. After the incubation, add 10 ml of RPMI+15% serum.

[1191] The Jurkat:GAS-SEAP stable reporter lines are maintained in RPMI+10% serum, 1 mg/ml Genticin, and 1% Pen-Strep. These cells are treated with supernatants containing polypeptide of the present invention or polypeptide of the present invention induced polypeptides as produced by the protocol described in Example 30.

[1192] On the day of treatment with the supernatant, the cells should be washed and resuspended in fresh RPMI+10% serum to a density of 500,000 cells per ml. The exact number of cells required will depend on the number of supernatants being screened. For one 96 well plate, approximately 10 million cells (for 10 plates, 100 million cells) are required.

[1193] Transfer the cells to a triangular reservoir boat, in order to dispense the cells into a 96 well dish, using a 12 channel pipette. Using a 12 channel pipette, transfer 200 ul of cells into each well (therefore adding 100,000 cells per well).

[1194] After all the plates have been seeded, 50 ul of the supernatants are transferred directly from the 96 well plate containing the supernatants into each well using a 12 channel pipette. In addition, a dose of exogenous interferon gamma (0.1, 1.0, 10 ng) is added to wells H9, H10, and H11 to serve as additional positive controls for the assay.

[1195] The 96 well dishes containing Jurkat cells treated with supernatants are placed in an incubator for 48 hrs (note: this time is variable between 48-72 hrs). 35 ul samples from each well are then transferred to an opaque 96 well plate using a 12 channel pipette. The opaque plates should be covered (using sellophene covers) and stored at −20 degree C. until SEAP assays are performed according to Example 36. The plates containing the remaining treated cells are placed at 4 degree C. and serve as a source of material for repeating the assay on a specific well if desired.

[1196] As a positive control, 100 Unit/ml interferon gamma can be used which is known to activate Jurkat T cells. Over 30 fold induction is typically observed in the positive control wells.

[1197] The above protocol may be used in the generation of both transient, as well as, stable transfected cells, which would be apparent to those of skill in the art.

### Example 33

### High-throughput Screening Assay Identifying Myeloid Activity

[1198] The following protocol is used to assess myeloid activity of polypeptide of the present invention by determining whether polypeptide of the present invention proliferates and/or differentiates myeloid cells. Myeloid cell activity is assessed using the GAS/SEAP/Neo construct produced in Example 31. Thus, factors that increase SEAP activity indicate the ability to activate the Jaks-STATS signal transduction pathway. The myeloid cell used in this assay is U937, a pre-monocyte cell line, although TF-1, HL60, or KG1 can be used.

[1199] To transiently transfect U937 cells with the GAS/SEAP/Neo construct produced in Example 31, a DEAE-Dextran method (Kharbanda et. al., 1994, Cell Growth & Differentiation, 5:259-265) is used. First, harvest 2×10⁷ U937 cells and wash with PBS. The U937 cells are usually grown in RPMI 1640 medium containing 10% heat-inactivated fetal bovine serum (FBS) supplemented with 100 units/ml penicillin and 100 mg/ml streptomyc in.

[1200] Next, suspend the cells in 1 ml of 20 mM Tris-HCl (pH 7.4) buffer containing 0.5 mg/ml DEAE-Dextran, 8 ug GAS-SEAP2 plasmid DNA, 140 mM NaCl, 5 mM KCl, 375 uM Na₂HPO₄.7H₂O, 1 mM MgCl₂, and 675 uM CaCl₂. Incubate at 37 degrees C. for 45 min.

[1201] Wash the cells with RPMI 1640 medium containing 10% FBS and then resuspend in 10 ml complete medium and incubate at 37 degree C. for 36 hr.

[1202] The GAS-SEAP/U937 stable cells are obtained by growing the cells in 400 ug/ml G418. The G418-free medium is used for routine growth but every one to two months, the cells should be re-grown in 400 ug/ml G418 for couple of passages.

[1203] These cells are tested by harvesting 1×10⁸ cells (this is enough for ten 96-well plates assay) and wash with PBS. Suspend the cells in 200 ml above described growth medium, with a final density of 5×10⁵ cells/ml. Plate 200 ul cells per well in the 96-well plate (or 1×10⁵ cells/well).

[1204] Add 50 ul of the supernatant prepared by the protocol described in Example 30. Incubate at 37 degee C. for 48 to 72 hr. As a positive control, 100 Unit/ml interferon gamma can be used which is known to activate U937 cells. Over 30 fold induction is typically observed in the positive control wells. SEAP assay the supernatant according to the protocol described in Example 36.

### Example 34

### High-throughput Screening Assay Identifying Neuronal Activity.

[1205] When cells undergo differentiation and proliferation, a group of genes are activated through many different signal transduction pathways. One of these genes, EGRI (early growth response gene 1), is induced in various tissues and cell types upon activation. The promoter of EGRI is responsible for such induction. Using the EGRI promoter linked to reporter molecules, activation of cells can be assessed by polypeptide of the present invention.

[1206] Particularly, the following protocol is used to assess neuronal activity in PC12 cell lines. PC12 cells (rat phenochromocytoma cells) are known to proliferate and/or differentiate by activation with a number of mitogens, such as TPA (tetradecanoyl phorbol acetate), NGF (nerve growth factor), and EGF (epidermal growth factor). The EGR1 gene expression is activated during this treatment. Thus, by stably transfecting PC12 cells with a construct containing an EGR promoter linked to SEAP reporter, activation of PC12 cells by polypeptide of the present invention can be assessed.

[1207] The EGR/SEAP reporter construct can be assembled by the following protocol. The EGR-1 promoter sequence (−633 to +1)(Sakamoto K et al., Oncogene 6:867-871 (1991)) can be PCR amplified from human genomic DNA using the following primers: 5′ GCGCTCGAGGGATGACAGCGATAGAACCCCGG-3′ (SEQ ID NO: 6) 5′ GCGAAGCTTCGCGACTCCCCGGATCCGCCTC-3′ (SEQ ID NO: 7)

[1208] Using the GAS:SEAP/Neo vector produced in Example 31, EGR1 amplified product can then be inserted into this vector. Linearize the GAS:SEAP/Neo vector using restriction enzymes XhoI/HindIII, removing the GAS/SV40 stuffer. Restrict the EGRI amplified product with these same enzymes. Ligate the vector and the EGRI promoter.

[1209] To prepare 96 well-plates for cell culture, two mls of a coating solution (1:30 dilution of collagen type I (Upstate Biotech Inc. Cat#08-115) in 30% ethanol (filter sterilized)) is added per one 10 cm plate or 50 ml per well of the 96-well plate, and allowed to air dry for 2 hr.

[1210] PC12 cells are routinely grown in RPMI-1640 medium (Bio Whittaker) containing 10% horse serum (JRH BIOSCIENCES, Cat. # 12449-78P), 5% heat-inactivated fetal bovine serum (FBS) supplemented with 100 units/ml penicillin and 100 ug/ml streptomycin on a precoated 10 cm tissue culture dish. One to four split is done every three to four days. Cells are removed from the plates by scraping and resuspended with pipetting up and down for more than 15 times.

[1211] Transfect the EGR/SEAP/Neo construct into PC12 using the Lipofectamine protocol described in Example 30. EGR-SEAP/PC12 stable cells are obtained by growing the cells in 300 ug/ml G418. The G418-free medium is used for routine growth but every one to two months, the cells should be re-grown in 300 ug/ml G418 for couple of passages.

[1212] To assay for neuronal activity, a 10 cm plate with cells around 70 to 80% confluent is screened by removing the old medium. Wash the cells once with PBS (Phosphate buffered saline). Then starve the cells in low serum medium (RPMI-1640 containing 1% horse serum and 0.5% FBS with antibiotics) overnight.

[1213] The next morning, remove the medium and wash the cells with PBS. Scrape off the cells from the plate, suspend the cells well in 2 ml low serum medium. Count the cell number and add more low serum medium to reach final cell density as 5×10⁵ cells/ml.

[1214] Add 200 ul of the cell suspension to each well of 96-well plate (equivalent to 1×10⁵ cells/well). Add 50 ul supematant produced by Example 30, 37 degree C. for 48 to 72 hr. As a positive control, a growth factor known to activate PCl2 cells through EGR can be used, such as 50 ng/ul of Neuronal Growth Factor (NGF). Over fifty-fold induction of SEAP is typically seen in the positive control wells. SEAP assay the supernatant according to Example 36.

### Example 35

### High-throughput Screening Assay for T-cell Activity

[1215] NF-KB (Nuclear Factor KB) is a transcription factor activated by a wide variety of agents including the inflammatory cytokines IL-1 and TNF, CD30 and CD40, lymphotoxin-alpha and lymphotoxin-beta, by exposure to LPS or thrombin, and by expression of certain viral gene products. As a transcription factor, NF-KB regulates the expression of genes involved in immune cell activation, control of apoptosis (NF-KB appears to shield cells from apoptosis), B and T-cell development, anti-viral and antimicrobial responses, and multiple stress responses.

[1216] In non-stimulated conditions, NF-KB is retained in the cytoplasm with I-KB (Inhibitor KB). However, upon stimulation, I-KB is phosphorylated and degraded, causing NF-KB to shuttle to the nucleus, thereby activating transcription of target genes. Target genes activated by NF-KB include IL-2, IL-6, GM-CSF, ICAM-1 and class 1 MHC.

[1217] Due to its central role and ability to respond to a range of stimuli, reporter constructs utilizing the NF-KB promoter element are used to screen the supernatants produced in Example 30. Activators or inhibitors of NF-KB would be useful in treating, preventing, and/or diagnosing diseases. For example, inhibitors of NF-KB could be used to treat those diseases related to the acute or chronic activation of NF-KB, such as rheumatoid arthritis.

[1218] To construct a vector containing the NF-KB promoter element, a PCR based strategy is employed. The upstream primer contains four tandem copies of the NF-KB binding site (GGGGACTTTCCC) (SEQ ID NO: 8), 18 bp of sequence complementary to the 5′ end of the SV40 early promoter sequence, and is flanked with an XhoI site:

| | |
|---|---|
| 5’:GCGGCCTCGAGGGGACTTTCCCGGGGACTTTCCGGGGACTTTCCGGGACTTTC | (SEQ ID NO: 9) |
| CATCCTGCCATCTCAATTAG:3’ | |

[1219] The downstream primer is complementary to the 3′ end of the SV40 promoter and is flanked with a Hind III site: 5′:GCGGCAAGCTTTTTGCAAAGCCTAGGC:3′ (SEQ ID NO: 4)

[1220] PCR amplification is performed using the SV40 promoter template present in the pB-gal:promoter plasmid obtained from Clontech. The resulting PCR fragment is digested with XhoI and Hind III and subcloned into BLSK2-. (Stratagene) Sequencing with the T7 and T3 primers confirms the insert contains the following sequence:

| | |
|---|---|
| 5’:CTCGAGGGGACTTTCCCGGGGACTTTCCGGGGACTTTCCGGGACTTTCCATCTG | (SEQ ID NO: 10) |
| CCATCTCAATTAGTCAGCAACCATAGTCCCGCCCCTAACTCCGCCCATCCCGCCC | |
| CTAACTCCGCCCAGTTCCGCCCATTCTCCGCCCCATGGCTGACTAATTTTTTTTAT | |
| TTATGCAGAGGCCGAGGCCGCCTCGGCCTCTGAGCTATTCCAGAAGTAGTGAGG | |
| AGGCTTTTTTGGAGGCCTAGGCTTTTGCAAAAAGCTT:3’ | |

[1221] Next, replace the SV40 minimal promoter element present in the pSEAP2-promoter plasmid (Clontech) with this NF-KB/SV40 fragment using XhoI and HindIII. However, this vector does not contain a neomycin resistance gene, and therefore, is not preferred for mammalian expression systems.

[1222] In order to generate stable mammalian cell lines, the NF-KB/SV40/SEAP cassette is removed from the above NF-KB/SEAP vector using restriction enzymes SalI and NotI, and inserted into a vector containing neomycin resistance. Particularly, the NF-KB/SV40/SEAP cassette was inserted into pGFP-1 (Clontech), replacing the GFP gene, after restricting pGFP-1 with SalI and NotI.

[1223] Once NF-KB/SV40/SEAP/Neo vector is created, stable Jurkat T-cells are created and maintained according to the protocol described in Example 32. Similarly, the method for assaying supernatants with these stable Jurkat T-cells is also described in Example 32. As a positive control, exogenous TNF alpha (0.1,1, 10 ng) is added to wells H9, H10, and H11, with a 5-10 fold activation typically observed.

### Example 36

### Assay for SEAP Activity

[1224] As a reporter molecule for the assays described in Examples 32-35, SEAP activity is assayed using the Tropix Phospho-light Kit (Cat. BP-400) according to the following general procedure. The Tropix Phospho-light Kit supplies the Dilution, Assay, and Reaction Buffers used below.

[1225] Prime a dispenser with the 2.5× Dilution Buffer and dispense 15 ul of 2.5× dilution buffer into Optiplates containing 35 ul of a supernatant. Seal the plates with a plastic sealer and incubate at 65 degree C. for 30 min. Separate the Optiplates to avoid uneven heating.

[1226] Cool the samples to room temperature for 15 minutes. Empty the dispenser and prime with the Assay Buffer. Add 50 ml Assay Buffer and incubate at room temperature 5 min. Empty the dispenser and prime with the Reaction Buffer (see the Table below). Add 50 ul Reaction Buffer and incubate at room temperature for 20 minutes. Since the intensity of the chemiluminescent signal is time dependent, and it takes about 10 minutes to read 5 plates on a luminometer, thus one should treat 5 plates at each time and start the second set 10 minutes later.

[1227] Read the relative light unit in the luminometer. Set H12 as blank, and print the results. An increase in chemiluminescence indicates reporter activity.

Reaction Buffer Formulation:

| # of plates | Rxn buffer diluent (ml) | CSPD (ml) |
|---|---|---|
| 10 | 60 | 3 |
| 11 | 65 | 3.25 |
| 12 | 70 | 3.5 |
| 13 | 75 | 3.75 |
| 14 | 80 | 4 |
| 15 | 85 | 4.25 |
| 16 | 90 | 4.5 |
| 17 | 95 | 4.75 |
| 18 | 100 | 5 |
| 19 | 105 | 5.25 |
| 20 | 110 | 5.5 |
| 21 | 115 | 5.75 |
| 22 | 120 | 6 |
| 23 | 125 | 6.25 |
| 24 | 130 | 6.5 |
| 25 | 135 | 6.75 |
| 26 | 140 | 7 |
| 27 | 145 | 7.25 |
| 28 | 150 | 7.5 |
| 29 | 155 | 7.75 |
| 30 | 160 | 8 |
| 31 | 165 | 8.25 |
| 32 | 170 | 8.5 |
| 33 | 175 | 8.75 |
| 34 | 180 | 9 |
| 35 | 185 | 9.25 |
| 36 | 190 | 9.5 |
| 37 | 195 | 9.75 |
| 38 | 200 | 10 |
| 39 | 205 | 10.25 |
| 40 | 210 | 10.5 |
| 41 | 215 | 10.75 |
| 42 | 220 | 11 |
| 43 | 225 | 11.25 |
| 44 | 230 | 11.5 |
| 45 | 235 | 11.75 |
| 46 | 240 | 12 |
| 47 | 245 | 12.25 |
| 48 | 250 | 12.5 |
| 49 | 255 | 12.75 |
| 50 | 260 | 13 |

### Example 37

### High-throughput Screening Assay Identifying Changes in Small Molecule Concentration and Membrane Permeability

[1228] Binding of a ligand to a receptor is known to alter intracellular levels of small molecules, such as calcium, potassium, sodium, and pH, as well as alter membrane potential. These alterations can be measured in an assay to identify supernatants which bind to receptors of a particular cell. Although the following protocol describes an assay for calcium, this protocol can easily be modified to detect changes in potassium, sodium, pH, membrane potential, or any other small molecule which is detectable by a fluorescent probe.

[1229] The following assay uses Fluorometric Imaging Plate Reader (“FLIPR”) to measure changes in fluorescent molecules (Molecular Probes) that bind small molecules. Clearly, any fluorescent molecule detecting a small molecule can be used instead of the calcium fluorescent molecule, fluo-4 (Molecular Probes, Inc.; catalog no. F-14202), used here.

[1230] For adherent cells, seed the cells at 10,000 -20,000 cells/well in a Co-star black 96-well plate with clear bottom. The plate is incubated in a CO₂ incubator for 20 hours. The adherent cells are washed two times in Biotek washer with 200 ul of HBSS (Hank's Balanced Salt Solution) leaving 100 ul of buffer after the final wash.

[1231] A stock solution of 1 mg/ml fluo-4 is made in 10% pluronic acid DMSO. To load the cells with fluo-4, 50 ul of 12 ug/ml fluo-4 is added to each well. The plate is incubated at 37 degrees C. in a C0₂ incubator for 60 min. The plate is washed four times in the Biotek washer with HBSS leaving 100 ul of buffer.

[1232] For non-adherent cells, the cells are spun down from culture media. Cells are re-suspended to 2-5×10⁶ cells/ml with HBSS in a 50-ml conical tube. 4 ul of 1 mg/ml fluo-4 solution in 10% pluronic acid DMSO is added to each ml of cell suspension. The tube is then placed in a 37 degrees C. water bath for 30-60 min. The cells are washed twice with HBSS, resuspended to 1×10⁶ cells/ml, and dispensed into a microplate, 100 ul/well. The plate is centrifuged at 1000 rpm for 5 min. The plate is then washed once in Denley Cell Wash with 200 ul, followed by an aspiration step to 100 ul final volume.

[1233] For a non-cell based assay, each well contains a fluorescent molecule, such as fluo-4. The supernatant is added to the well, and a change in fluorescence is detected.

[1234] To measure the fluorescence of intracellular calcium, the FLIPR is set for the following parameters: (1) System gain is 300-800 mW; (2) Exposure time is 0.4 second; (3) Camera F/stop is F/2; (4) Excitation is 488 nm; (5) Emission is 530 nm; and (6) Sample addition is 50 ul. Increased emission at 530 nm indicates an extracellular signaling event caused by the a molecule, either polypeptide of the present invention or a molecule induced by polypeptide of the present invention, which has resulted in an increase in the intracellular Ca⁺⁺ concentration.

### Example 38

### High-throughput Screening Assay Identifying Tyrosine Kinase Activity

[1235] The Protein Tyrosine Kinases (PTK) represent a diverse group of transmembrane and cytoplasmic kinases. Within the Receptor Protein Tyrosine Kinase RPTK) group are receptors for a range of mitogenic and metabolic growth factors including the PDGF, FGF, EGF, NGF, HGF and Insulin receptor subfamilies. In addition there are a large family of RPTKs for which the corresponding ligand is unknown. Ligands for RPTKs include mainly secreted small proteins, but also membrane-bound and extracellular matrix proteins.

[1236] Activation of RPTK by ligands involves ligand-mediated receptor dimerization, resulting in transphosphorylation of the receptor subunits and activation of the cytoplasmic tyrosine kinases. The cytoplasmic tyrosine kinases include receptor associated tyrosine kinases of the src-family (e.g., src, yes, lck, lyn, fyn) and non-receptor linked and cytosolic protein tyrosine kinases, such as the Jak family, members of which mediate signal transduction triggered by the cytokine superfamily of receptors (e.g., the Interleukins, Interferons, GM-CSF, and Leptin).

[1237] Because of the wide range of known factors capable of stimulating tyrosine kinase activity, identifying whether polypeptide of the present invention or a molecule induced by polypeptide of the present invention is capable of activating tyrosine kinase signal transduction pathways is of interest. Therefore, the following protocol is designed to identify such molecules capable of activating the tyrosine kinase signal transduction pathways.

[1238] Seed target cells (e.g., primary keratinocytes) at a density of approximately 25,000 cells per well in a 96 well Loprodyne Silent Screen Plates purchased from Nalge Nunc (Naperville, Ill.). The plates are sterilized with two 30 minute rinses with 100% ethanol, rinsed with water and dried overnight. Some plates are coated for 2 hr with 100 ml of cell culture grade type I collagen (50 mg/ml), gelatin (2%) or polylysine (50 mg/ml), all of which can be purchased from Sigma Chemicals (St. Louis, Mo.) or 10% Matrigel purchased from Becton Dickinson (Bedford, Mass.), or calf serum, rinsed with PBS and stored at 4 degree C. Cell growth on these plates is assayed by seeding 5,000 cells/well in growth medium and indirect quantitation of cell number through use of alamarBlue as described by the manufacturer Alamar Biosciences, Inc. (Sacramento, Calif.) after 48 hr. Falcon plate covers #3071 from Becton Dickinson (Bedford, Mass.) are used to cover the Loprodyne Silent Screen Plates. Falcon Microtest III cell culture plates can also be used in some proliferation experiments.

[1239] To prepare extracts, A431 cells are seeded onto the nylon membranes of Loprodyne plates (20,000/200 mUwell) and cultured overnight in complete medium. Cells are quiesced by incubation in serum-free basal medium for 24 hr. After 5-20 minutes treatment with EGF (60 ng/ml) or 50 ul of the supernatant produced in Example 30, the medium was removed and 100 ml of extraction buffer ((20 mM HEPES pH 7.5, 0.15 M NaCl, 1% Triton X-100, 0.1% SDS, 2 mM Na3VO4, 2 mM Na4P207 and a cocktail of protease inhibitors (# 1836170) obtained from Boeheringer Mannheim (Indianapolis, Ind.)) is added to each well and the plate is shaken on a rotating shaker for 5 minutes at 4° C. The plate is then placed in a vacuum transfer manifold and the extract filtered through the 0.45 mm membrane bottoms of each well using house vacuum. Extracts are collected in a 96-well catch/assay plate in the bottom of the vacuum manifold and immediately placed on ice. To obtain extracts clarified by centrifugation, the content of each well, after detergent solubilization for 5 minutes, is removed and centrifuged for 15 minutes at 4 degree C. at 16,000× g.

[1240] Test the filtered extracts for levels of tyrosine kinase activity. Although many methods of detecting tyrosine kinase activity are known, one method is described here.

[1241] Generally, the tyrosine kinase activity of a supernatant is evaluated by determining its ability to phosphorylate a tyrosine residue on a specific substrate (a biotinylated peptide). Biotinylated peptides that can be used for this purpose include PSK1 (corresponding to amino acids 6-20 of the cell division kinase cdc2-p34) and PSK2 (corresponding to amino acids 1-17 of gastrin). Both peptides are substrates for a range of tyrosine kinases and are available from Boehringer Mannheim.

[1242] The tyrosine kinase reaction is set up by adding the following components in order. First, add lOul of SuM Biotinylated Peptide, then 10 ul ATP/Mg₂₊ (5mM ATP/5OmM MgCl₂), then lOul of 5× Assay Buffer (4OmM imidazole hydrochloride, pH7.3, 40 mM beta-glycerophosphate, 1 mM EGTA, 100 mM MgCl₂, 5 mM MnCl₂, 0.5 mg/ml BSA), then Sul of Sodium Vanadate (1 mM), and then 5 ul of water. Mix the components gently and preincubate the reaction mix at 30 degree C. for 2 min. Initial the reaction by adding 10 ul of the control enzyme or the filtered supernatant.

[1243] The tyrosine kinase assay reaction is then terminated by adding 10 ul of 120 mm EDTA and place the reactions on ice.

[1244] Tyrosine kinase activity is determined by transferring 50 ul aliquot of reaction mixture to a microtiter plate (MTP) module and incubating at 37 degree C. for 20 min. This allows the streptavidin coated 96 well plate to associate with the biotinylated peptide. Wash the MTP module with 300 ul/well of PBS four times. Next add 75 ul of anti-phospotyrosine antibody conjugated to horse radish peroxidase(anti-P-Tyr-POD (0.5 u/ml)) to each well and incubate at 37 degree C. for one hour. Wash the well as above.

[1245] Next add 100 ul of peroxidase substrate solution (Boehringer Mannheim) and incubate at room temperature for at least 5 mins (up to 30 min). Measure the absorbance of the sample at 405 nm by using ELISA reader. The level of bound peroxidase activity is quantitated using an ELISA reader and reflects the level of tyrosine kinase activity.

### Example 39

### High-throughput Screening Assay Identifying Phosphorylation Activity

[1246] As a potential alternative and/or complement to the assay of protein tyrosine kinase activity described in Example 38, an assay which detects activation (phosphorylation) of major intracellular signal transduction intermediates can also be used. For example, as described below one particular assay can detect tyrosine phosphorylation of the Erk-1 and Erk-2 kinases. However, phosphorylation of other molecules, such as Raf, JNK, p38 MAP, Map kinase kinase (MEK), MEK kinase, Src, Muscle specific kinase (MuSK), IRAK, Tec, and Janus, as well as any other phosphoserine, phosphotyrosine, or phosphothreonine molecule, can be detected by substituting these molecules for Erk-1 or Erk-2 in the following assay.

[1247] Specifically, assay plates are made by coating the wells of a 96-well ELISA plate with 0.1 ml of protein G (lug/ml) for 2 hr at room temp, (RT). The plates are then rinsed with PBS and blocked with 3% BSA/PBS for 1 hr at RT. The protein G plates are then treated with 2 commercial monoclonal antibodies (100 ng/well) against Erk-1 and Erk-2 (1 hr at RT) (Santa Cruz Biotechnology). (To detect other molecules, this step can easily be modified by substituting a monoclonal antibody detecting any of the above described molecules.) After 3-5 rinses with PBS, the plates are stored at 4 degree C. until use.

[1248] A431 cells are seeded at 20,000/well in a 96-well Loprodyne filterplate and cultured overnight in growth medium. The cells are then starved for 48 hr in.basal medium (DMEM) and then treated with EGF (6 ng/well) or 50 ul of the supernatants obtained in Example 30 for 5-20 minutes. The cells are then solubilized and extracts filtered directly into the assay plate.

[1249] After incubation with the extract for 1 hr at RT, the wells are again rinsed. As a positive control, a commercial preparation of MAP kinase (10 ng/well) is used in place of A431 extract. Plates are then treated with a commercial polyclonal (rabbit) antibody (1 ug/ml) which specifically recognizes the phosphorylated epitope of the Erk-1 and Erk-2 kinases (1 hr at RT). This antibody is biotinylated by standard procedures. The bound polyclonal antibody is then quantitated by successive incubations with Europium-streptavidin and Europium fluorescence enhancing reagent in the Wallac DELFIA instrument (time-resolved fluorescence). An increased fluorescent signal over background indicates a phosphorylation by polypeptide of the present invention or a molecule induced by polypeptide of the present invention.

### Example 40

### Assay for the Stimulation of Bone Marrow CD34+ Cell Proliferation

[1250] This assay is based on the ability of human CD34+ to proliferate in the presence of hematopoietic growth factors and evaluates the ability of isolated polypeptides expressed in mammalian cells to stimulate proliferation of CD34+ cells.

[1251] It has been previously shown that most mature precursors will respond to only a single signal. More immature precursors require at least two signals to respond. Therefore, to test the effect of polypeptides on hematopoietic activity of a wide range of progenitor cells, the assay contains a given polypeptide in the presence or absence of other hematopoietic growth factors. Isolated cells are cultured for 5 days in the presence of Stem Cell Factor (SCF) in combination with tested sample. SCF alone has a very limited effect on the proliferation of bone marrow (BM) cells, acting in such conditions only as a “survival” factor. However, combined with any factor exhibiting stimulatory effect on these cells (e.g., IL-3), SCF will cause a synergistic effect. Therefore, if the tested polypeptide has a stimulatory effect on hematopoietic progenitors, such activity can be easily detected. Since normal BM cells have a low level of cycling cells, it is likely that any inhibitory effect of a given polypeptide, or agonists or antagonists thereof, might not be detected. Accordingly, assays for an inhibitory effect on progenitors is preferably tested in cells that are first subjected to in vitro stimulation with SCF+IL+3, and then contacted with the compound that is being evaluated for inhibition of such induced proliferation.

[1252] Briefly, CD34+ cells are isolated using methods known in the art. The cells are thawed and resuspended in medium (QBSF 60 serum-free medium with 1% L-glutamine (500 ml) Quality Biological, Inc., Gaithersburg, Md. Cat# 160-204-101). After several gentle centrifugation steps at 200× g, cells are allowed to rest for one hour. The cell count is adjusted to 2.5×10⁵ cells/ml. During this time, 100 μl of sterile water is added to the peripheral wells of a 96-well plate. The cytokines that can be tested with a given polypeptide in this assay is rhSCF (R&D Systems, Minneapolis, MN, Cat# 255-SC) at 50 ng/ml alone and in combination with rhSCF and rhIL-3 (R&D Systems, Minneapolis, MN, Cat# 203-ML) at 30 ng/ml. After one hour, 10 μl of prepared cytokines, 50 μl of the supernatants prepared in Example 30 (supernatants at 1:2 dilution =50 μl) and 20 μl of diluted cells are added to the media which is already present in the wells to allow for a final total volume of 100 μl. The plates are then placed in a 37° C/5% CO₂ incubator for five days.

[1253] Eighteen hours before the assay is harvested, 0.5 μCi/well of [3H] Thymidine is added in a 10 μl volume to each well to determine the proliferation rate. The experiment is terminated by harvesting the cells from each 96-well plate to a filtermat using the Tomtec Harvester 96. After harvesting, the filtermats are dried, trimmed and placed into OmniFilter assemblies consisting of one OmniFilter plate and one OmniFilter Tray. 60 μl Microscint is added to each well and the plate sealed with TopSeal-A press-on sealing film A bar code 15 sticker is affixed to the first plate for counting. The sealed plates are then loaded and the level of radioactivity determined via the Packard Top Count and the printed data collected for analysis. The level of radioactivity reflects the amount of cell proliferation.

[1254] The studies described in this example test the activity of a given polypeptide to stimulate bone marrow CD34+ cell proliferation. One skilled in the art could easily modify the exemplified studies to test the activity of polynucleotides (e.g., gene therapy), antibodies, agonists, and/or antagonists and fragments and variants thereof. As a nonlimiting example, potential antagonists tested in this assay would be expected to inhibit cell proliferation in the presence of cytokines and/or to increase the inhibition of cell proliferation in the presence of cytokines and a given polypeptide. In contrast, potential agonists tested in this assay would be expected to enhance cell proliferation and/or to decrease the inhibition of cell proliferation in the presence of cytokines and a given polypeptide.

[1255] The ability of a gene to stimulate the proliferation of bone marrow CD34+ cells indicates that polynucleotides and polypeptides corresponding to the gene are useful for the diagnosis and treatment of disorders affecting the immune system and hematopoiesis. Representative uses are described in the “Immune Activity” and “Infectious Disease” sections above, and elsewhere herein.

### Example 41

### Assay for Extracellular Matrix Enhanced Cell Response (EMECR)

[1256] The objective of the Extracellular Matrix Enhanced Cell Response (EMECR) assay is to identify gene products (e.g., isolated polypeptides) that act on the hematopoietic stem cells in the context of the extracellular matrix (ECM) induced signal.

[1257] Cells respond to the regulatory factors in the context of signal(s) received from the surrounding microenvironment. For example, fibroblasts, and endothelial and epithelial stem cells fail to replicate in the absence of signals from the ECM. Hematopoietic stem cells can undergo self-renewal in the bone marrow, but not in in vitro suspension culture. The ability of stem cells to undergo self-renewal in vitro is dependent upon their interaction with the stromal cells and the ECM protein fibronectin (fn). Adhesion of cells to fn is mediated by the α₅.β₁ and α4.β₁ integrin receptors, which are expressed by human and mouse hematopoietic stem cells. The factor(s) which integrate with the ECM environment and are responsible for stimulating stem cell self-renewal havea not yet been identified. Discovery of such factors should be of great interest in gene therapy and bone marrow transplant applications

[1258] Briefly, polystyrene, non tissue culture treated, 96-well plates are coated with fn fragment at a coating concentration of 0.2 μg/cm². Mouse bone marrow cells are plated (1,000 cells/well) in 0.2 ml of serum-free medium. Cells cultured in the presence of IL-3 (5 ng/ml)+SCF (50 ng/ml) would serve as the positive control, conditions under which little self-renewal but pronounced differentiation of the stem cells is to be expected. Gene products of the invention (e.g., including, but not limited to, polynucleotides and polypeptides of the present invention, and supernatants produced in Example 30), are tested with appropriate negative controls in the presence and absence of SCF (5.0 ng/ml), where test factor supernatants represent 10% of the total assay volume. The plated cells are then allowed to grow by incubating in a low oxygen environment (5% CO₂, 7% O₂, and 88% N₂) tissue culture incubator for 7 days. The number of proliferating cells within the wells is then quantitated by measuring thymidine incorporation into cellular DNA. Verification of the positive hits in the assay will require phenotypic characterization of the cells, which can be accomplished by scaling up of the culture system and using appropriate antibody reagents against cell surface antigens and FACScan.

[1259] One skilled in the art could easily modify the exemplified studies to test the activity of polynucleotides (e.g., gene therapy), antibodies, agonists, and/or antagonists and fragments and variants thereof.

[1260] If a particular polypeptide of the present invention is found to be a stimulator of hematopoietic progenitors, polynucleotides and polypeptides corresponding to the gene encoding said polypeptide may be useful for the diagnosis and treatment of disorders affecting the immune system and hematopoiesis. Representative uses are described in the “Immune Activity” and “Infectious Disease” sections above, and elsewhere herein. The gene product may also be useful in the expansion of stem cells and committed progenitors of various blood lineages, and in the differentiation and/or proliferation of various cell types.

[1261] Additionally, the polynucleotides and/or polypeptides of the gene of interest and/or agonists and/or antagonists thereof, may also be employed to inhibit the proliferation and differentiation of hematopoietic cells and therefore may be employed to protect bone marrow stem cells from chemotherapeutic agents during chemotherapy. This antiproliferative effect may allow administration of higher doses of chemotherapeutic agents and, therefore, more effective chemotherapeutic treatment.

[1262] Moreover, polynucleotides and polypeptides corresponding to the gene of interest may also be useful for the treatment and diagnosis of hematopoietic related disorders such as, for example, anemia, pancytopenia, leukopenia, thrombocytopenia or leukemia since stromal cells are important in the production of cells of hematopoietic lineages. The uses include bone marrow cell ex-vivo culture, bone marrow transplantation, bone marrow reconstitution, radiotherapy or chemotherapy of neoplasia.

### Example 42

### Human Dermal Fibroblast and Aortic Smooth Muscle Cell Proliferation

[1263] The polypeptide of interest is added to cultures of normal human dermal fibroblasts (NHDF) and human aortic smooth muscle cells (AoSMC) and two co-assays are performed with each sample. The first assay examines the effect of the polypeptide of interest on the proliferation of normal human dermal fibroblasts (NHDF) or aortic smooth muscle cells (AoSMC). Aberrant growth of fibroblasts or smooth muscle cells is a part of several pathological processes, including fibrosis, and restenosis. The second assay examines IL6 production by both NHDF and SMC. IL6 production is an indication of functional activation. Activated cells will have increased production of a number of cytokines and other factors, which can result in a proinflammatory or immunomodulatory outcome. Assays are run with and without co-TNFa stimulation, in order to check for costimulatory or inhibitory activity.

[1264] Briefly, on day 1, 96-well black plates are set up with 1000 cells/well (NHDF) or 2000 cells/well (AOSMC) in 100 μl culture media. NHDF culture media contains: Clonetics FB basal media, 1 mg/ml hFGF, 5 mg/ml insulin, 50 mg/ml gentamycin, 2%FBS, while AoSMC culture media contains Clonetics SM basal media, 0.5 Lig/ml hEGF, 5 mg/ml insulin, 1 ug/ml hFGF, 50 mg/ml gentamycin, 50 μg/ml Amphotericin B, 5%FBS. After incubation at 37° C. for at least 4-5 hours culture media is aspirated and replaced with growth arrest media. Growth arrest media for NHDF contains fibroblast basal media, 50 mg/ml gentamycin, 2% FBS, while growth arrest media for AoSMC contains SM basal media, 50 mg/ml gentamycin, 50 μg/ml Amphotericin B, 0.4% FBS. Incubate at 37° C. until day 2.

[1265] On day 2, serial dilutions and templates of the polypeptide of interest are designed such that they always include media controls and known-protein controls. For both stimulation and inhibition experiments, proteins are diluted in growth arrest media. For inhibition experiments, TNFa is added to a final concentration of 2 ng/ml (NHDF) or 5 ng/ml (AoSMC). Add 1/3 vol media containing controls or polypeptides of the present invention and incubate at 37 degrees C/5% CO₂ until day 5.

[1266] Transfer 60 μl from each well to another labeled 96-well plate, cover with a plate-sealer, and store at 4 degrees C. until Day 6 (for IL6 ELISA). To the remaining 100 μl in the cell culture plate, aseptically add Alamar Blue in an amount equal to 10% of the culture volume (101 μl). Return plates to incubator for 3 to 4 hours. Then measure fluorescence with excitation at 530 nm and emission at 590 nm using the CytoFluor. This yields the growth stimulation/inhibition data.

[1267] On day 5, the IL6 ELISA is performed by coating a 96 well plate with 50-100 ul/well of Anti-Human IL6 Monoclonal antibody diluted in PBS, pH 7.4, incubate ON at room temperature.

[1268] On day 6, empty the plates into the sink and blot on paper towels. Prepare Assay Buffer containing PBS with 4% BSA. Block the plates with 200 μl/well of Pierce Super Block blocking buffer in PBS for 1-2 hr and then wash plates with wash buffer (PBS, 0.05% Tween-20). Blot plates on paper towels. Then add 50 μl/well of diluted Anti-Human IL-6 Monoclonal, Biotin-labeled antibody at 0.50 mg/ml. Make dilutions of IL-6 stock in media (30, 10, 3, 1, 0.3, 0 ng/ml). Add duplicate samples to top row of plate. Cover the plates and incubate for 2 hours at RT on shaker.

[1269] Plates are washed with wash buffer and blotted on paper towels. Dilute EU-labeled Streptavidin 1:1000 in Assay buffer, and add 100 μL/well. Cover the plate and incubate 1 h at RT. Plates are again washed with wash buffer and blotted on paper towels.

[1270] Add 100 μl/well of Enhancement Solution. Shake for 5 minutes. Read the plate on the Wallac DELFIA Fluorometer. Readings from triplicate samples in each assay were tabulated and averaged.

[1271] A positive result in this assay suggests AoSMC cell proliferation and that the polypeptide of the present invention may be involved in dermal fibroblast proliferation and/or smooth muscle cell proliferation. A positive result also suggests many potential uses of polypeptides, polynucleotides, agonists and/or antagonists of the polynucleotide/polypeptide of the present invention which gives a positive result. For example, inflammation and immune responses, wound healing, and angiogenesis, as detailed throughout this specification. Particularly, polypeptides of the present invention and polynucleotides of the present invention may be used in wound healing and dermal regeneration, as well as the promotion of vasculogenesis, both of the blood vessels and lymphatics. The growth of vessels can be used in the treatment of, for example, cardiovascular diseases. Additionally, antagonists of polypeptides and polynucleotides of the invention may be useful in treating diseases, disorders, and/or conditions which involve angiogenesis by acting as an anti-vascular agent (e.g., anti-angiogenesis). These diseases, disorders, and/or conditions are known in the art and/or are described herein, such as, for example, malignancies, solid tumors, benign tumors, for example hemangiomas, acoustic neuromas, neurofibromas, trachomas, and pyogenic granulomas; artheroscleric plaques; ocular angiogenic diseases, for example, diabetic retinopathy, retinopathy of prematurity, macular degeneration, corneal graft rejection, neovascular glaucoma, retrolental fibroplasia, rubeosis, retinoblastoma, uvietis and Pterygia (abnormal blood vessel growth) of the eye; rheumatoid arthritis; psoriasis; delayed wound healing; endometriosis; vasculogenesis; granulations; hypertrophic scars (keloids); nonunion fractures; scleroderma; trachoma; vascular adhesions; myocardial angiogenesis; coronary collaterals; cerebral collaterals; arteriovenous malformations; ischemic limb angiogenesis; Osler-Webber Syndrome; plaque neovascularization; telangiectasia; hemophiliac joints; angiofibroma; fibromuscular dysplasia; wound granulation; Crohn's disease; and atherosclerosis. Moreover, antagonists of polypeptides and polynucleotides of the invention may be useful in treating anti-hyperproliferative diseases and/or anti-inflammatory known in the art and/or described herein.

[1272] One skilled in the art could easily modify the exemplified studies to test the activity of polynucleotides (e.g., gene therapy), antibodies, agonists, and/or antagonists and fragments and variants thereof.

### Example 43

### Cellular Adhesion Molecule (CAM) Expression on Endothelial Cells

[1273] The recruitment of lymphocytes to areas of inflammation and angiogenesis involves specific receptor-ligand interactions between cell surface adhesion molecules (CAMs) on lymphocytes and the vascular endothelium. The adhesion process, in both normal and pathological settings, follows a multi-step cascade that involves intercellular adhesion molecule-1 (ICAM-1), vascular cell adhesion molecule-1 (VCAM-1), and endothelial leukocyte adhesion molecule-1 (E-selectin) expression on endothelial cells (EC). The expression of these molecules and others on the vascular endothelium determines the efficiency with which leukocytes may adhere to the local vasculature and extravasate into the local tissue during the development of an inflammatory response. The local concentration of cytokines and growth factor participate in the modulation of the expression of these CAMs.

[1274] Briefly, endothelial cells (e.g., Human Umbilical Vein Endothelial cells (HUVECs)) are grown in a standard 96 well plate to confluence, growth medium is removed from the cells and replaced with 100 μl of 199 Medium (10% fetal bovine serum (FBS)). Samples for testing and positive or negative controls are added to the plate in triplicate (in 10 μl volumes). Plates are then incubated at 37° C. for either 5 h (selectin and integrin expression) or 24 h (integrin expression only). Plates are aspirated to remove medium and 100 μl of 0.1% paraformaldehyde-PBS(with Ca++and Mg++) is added to each well. Plates are held at 4° C. for 30 min. Fixative is removed from the wells and wells are washed IX with PBS(+Ca,Mg)+0.5% BSA and drained. 10 μl of diluted primary antibody is added to the test and control wells. Anti-ICAM-1-Biotin, Anti-VCAM-1-Biotin and Anti-E-selectin-Biotin are used at a concentration of 10 μg/ml (1:10 dilution of 0.1 mg/ml stock antibody). Cells are incubated at 37° C. for 30 min. in a humidified environment. Wells are washed three times with PBS(+Ca,Mg)+0.5% BSA. 20 μl of diluted ExtrAvidin-Alkaline Phosphatase (1:5,000 dilution, referred to herein as the working dilution) are added to each well and incubated at 37° C. for 30 min. Wells are washed three times with PBS(+Ca,Mg)+0.5% BSA. Dissolve 1 tablet of p-Nitrophenol Phosphate pNPP per 5 ml of glycine buffer (pH 10.4). 100 μl of pNPP substrate in glycine buffer is added to each test well. Standard wells in triplicate are prepared from the working dilution of the ExtrAvidin-Alkaline Phosphotase in glycine buffer: 1:5,000 (10⁰)>10^{-0.5}>10⁻¹>10^{-1.5} 0.5 μl of each dilution is added to triplicate wells and the resulting AP content in each well is 5.50 ng, 1.74 ng, 0.55 ng, 0.18 ng. 100 μl of pNNP reagent is then added to each of the standard wells. The plate is incubated at 37° C. for 4 h. A volume of 50 μl of 3M NaOH is added to all wells. The plate is read on a plate reader at 405 nm using the background subtraction option on blank wells filled with glycine buffer only. Additionally, the template is set up to indicate the concentration of AP-conjugate in each standard well [5.50 ng; 1.74 ng; 0.55 ng; 0.18 ng]. Results are indicated as amount of bound AP-conjugate in each sample.

### Example 44

### Alamar Blue Endothelial Cells Proliferation Assay

[1275] This assay may be used to quantitatively determine protein mediated inhibition of bFGF-induced proliferation of Bovine Lymphatic Endothelial Cells (LECs), Bovine Aortic Endothelial Cells (BAECs) or Human Microvascular Uterine Myometrial Cells (UTMECs). This assay incorporates a fluorometric growth indicator based on detection of metabolic activity. A standard Alamar Blue Proliferation Assay is prepared in EGM-2MV with 10 ng/ml of bFGF added as a source of endothelial cell stimulation. This assay may be used with a variety of endothelial cells with slight changes in growth medium and cell concentration. Dilutions of the protein batches to be tested are diluted as appropriate. Serum-free medium (GIBCO SFM) without bFGF is used as a non-stimulated control and Angiostatin or TSP-1 are included as a known inhibitory controls.

[1276] Briefly, LEC, BAECs or UTMECs are seeded in growth media at a density of 5000 to 2000 cells/well in a 96 well plate and placed at 37 degrees C. overnight. After the overnight incubation of the cells, the growth media is removed and replaced with GIBCO EC-SFM. The cells are treated with the appropriate dilutions of the protein of interest or control protein sample(s) (prepared in SFM) in triplicate wells with additional bFGF to a concentration of 10 ng/ml. Once the cells have been treated with the samples, the plate(s) is/are placed back in the 37° C. incubator for three days. After three days 10 ml of stock alamar blue (Biosource Cat# DAL 1100) is added to each well and the plate(s) is/are placed back in the 37° C. incubator for four hours. The plate(s) are then read at 530 nm excitation and 590 nm emission using the CytoFluor fluorescence reader. Direct output is recorded in relative fluorescence units.

[1277] Alamar blue is an oxidation-reduction indicator that both fluoresces and changes color in response to chemical reduction of growth medium resulting from cell growth. As cells grow in culture, innate metabolic activity results in a chemical reduction of the immediate surrounding environment. Reduction related to growth causes the indicator to change from oxidized (non-fluorescent blue) form to reduced (fluorescent red) form (i.e., stimulated proliferation will produce a stronger signal and inhibited proliferation will produce a weaker signal and the total signal is proportional to the total number of cells as well as their metabolic activity). The background level of activity is observed with the starvation medium alone. This is compared to the output observed from the positive control samples (bFGF in growth medium) and protein dilutions.

### Example 45

### Detection of Inhibition of a Mixed Lymphocyte Reaction

[1278] This assay can be used to detect and evaluate inhibition of a Mixed Lymphocyte Reaction (MLR) by gene products (e.g., isolated polypeptides). Inhibition of a MLR may be due to a direct effect on cell proliferation and viability, modulation of costimulatory molecules on interacting cells, modulation of adhesiveness between lymphocytes and accessory cells, or modulation of cytokine production by accessory cells. Multiple cells may be targeted by these polypeptides since the peripheral blood mononuclear fraction used in this assay includes T, B and natural killer lymphocytes, as well as monocytes and dendritic cells.

[1279] Polypeptides of interest found to inhibit the MLR may find application in diseases associated with lymphocyte and monocyte activation or proliferation. These include, but are not limited to, diseases such as asthma, arthritis, diabetes, inflammatory skin conditions, psoriasis, eczema, systemic lupus erythematosus, multiple sclerosis, glomerulonephritis, inflammatory bowel disease, crohn's disease, ulcerative colitis, arteriosclerosis, cirrhosis, graft vs. host disease, host vs. graft disease, hepatitis, leukemia and lymphoma.

[1280] Briefly, PBMCs from human donors are purified by density gradient centrifugation using Lymphocyte Separation Medium (LSM®, density 1.0770 g/ml, Organon Teknika Corporation, West Chester, Pa.). PBMCs from two donors are adjusted to 2×10⁶ cells/ml in RPMI-1640 (Life Technologies, Grand Island, N.Y.) supplemented with 10% FCS and 2 mM glutamine. PBMCs from a third donor is adjusted to 2×10⁵ cells/ml. Fifty microliters of PBMCs from each donor is added to wells of a 96-well round bottom microtiter plate. Dilutions of test materials (50 μl) is added in triplicate to microtiter wells. Test samples (of the protein of interest) are added for final dilution of 1:4; rhuIL-2 (R&D Systems, Minneapolis, Minn., catalog number 202-IL) is added to a final concentration of 1 μg/ml; anti-CD4 mAb (R&D Systems, clone 34930.11, catalog number MAB379) is added to a final concentration of 10 ug/ml. Cells are cultured for 7-8 days at 37° C. in 5% CO₂, and 1 LtC of [³H] thymidine is added to wells for the last 16 hrs of culture. Cells are harvested and thymidine incorporation determined using a Packard TopCount. Data is expressed as the mean and standard deviation of triplicate determinations.

[1281] Samples of the protein of interest are screened in separate experiments and compared to the negative control treatment, anti-CD4 mAb, which inhibits proliferation of lymphocytes and the positive control treatment, IL-2 (either as recombinant material or supernatant), which enhances proliferation of lymphocytes.

[1282] One skilled in the art could easily modify the exemplified studies to test the activity of polynucleotides (e.g., gene therapy), antibodies, agonists, and/or antagonists and fragments and variants thereof.

### Example 46

### Assays for Protease Activity

[1283] The following assay may be used to assess protease activity of the polypeptides of the invention.

[1284] Gelatin and casein zymography are performed essentially as described (Heusen et al., Anal. Biochem., 102:196-202 (1980); Wilson et al., Journal of Urology, 149:653-658 (1993)). Samples are run on 10% polyacryamide/0.1% SDS gels containing 1% gelain orcasein, soaked in 2.5% triton at room temperature for 1 hour, and in 0.1 μM glycine, pH 8.3 at 37° C. 5 to 16 hours. After staining in amido black areas of proteolysis apear as clear areas agains the blue-black background. Trypsin (Sigma T8642) is used as a positive control.

[1285] Protease activity is also determined by monitoring the cleavage of n-a-benzoyl-L-arginine ethyl ester (BAEE) (Sigma B-4500. Reactions are set up in (25mMNaPO₄, 1 mM EDTA, and lmM BAEE), pH 7.5. Samples are added and the change in adsorbance at 260 nm is monitored on the Beckman DU-6 spectrophotometer in the time-drive mode. Trypsin is used as a positive control.

[1286] Additional assays based upon the release of acid-soluble peptides from casein or hemoglobin measured as adsorbance at 280 nm or calorimetrically using the Folin method are performed as described in Bergmeyer, et al., Methods of Enzymatic Analysis, 5 (1984). Other assays involve the solubilization of chromogenic substrates (Ward, Applied Science, 251-317 (1983)).

### Example 47

### Identifying Serine Protease Substrate Specificity

[1287] Methods known in the art or described herein may be used to determine the substrate specificity of the polypeptides of the present invention having serine protease activity. A preferred method of determining substrate specificity is by the use of positional scanning synthetic combinatorial libraries as described in GB 2 324 529 (incorporated herein in its entirety).

### Example 48

### Ligand Binding Assays

[1288] The following assay may be used to assess ligand binding activity of the polypeptides of the invention.

[1289] Ligand binding assays provide a direct method for ascertaining receptor pharmacology and are adaptable to a high throughput format. The purified ligand for a polypeptide is radiolabeled to high specific activity (50-2000 Ci/mmol) for binding studies. A determination is then made that the process of radiolabeling does not diminish the activity of the ligand towards its polypeptide. Assay conditions for buffers, ions, pH and other modulators such as nucleotides are optimized to establish a workable signal to noise ratio for both membrane and whole cell polypeptide sources. For these assays, specific polypeptide binding is defined as total associated radioactivity minus the radioactivity measured in the presence of an excess of unlabeled competing ligand. Where possible, more than one competing ligand is used to define residual nonspecific binding.

### Example 49

### Functional Assay in Xenopus Oocytes

[1290] Capped RNA transcripts from linearized plasmid templates encoding the polypeptides of the invention are synthesized in vitro with RNA polymerases in accordance with standard procedures. In vitro transcripts are suspended in water at a final concentration of 0.2 mg/ml. Ovarian lobes are removed from adult female toads, Stage V defolliculated oocytes are obtained, and RNA transcripts (10 ng/oocytc) are injected in a 50 nl bolus using a microinjection apparatus. Two electrode voltage clamps are used to measure the currents from individual Xenopus oocytes in response polypeptides and polypeptide agonist exposure. Recordings are made in Ca2+ free Barth's medium at room temperature. The Xenopus system can be used to screen known ligands and tissue/cell extracts for activating ligands.

### Example 50

### Microphysiometric Assays

[1291] Activation of a wide variety of secondary messenger systems results in extrusion of small amounts of acid from a cell. The acid formed is largely as a result of the increased metabolic activity required to fuel the intracellular signaling process. The pH changes in the media surrounding the cell are very small but are detectable by the CYTOSENSOR microphysiometer (Molecular Devices Ltd., Menlo Park, Calif.). The CYTOSENSOR is thus capable of detecting the activation of polypeptide which is coupled to an energy utilizing intracellular signaling pathway.

### Example 51

### Extract/Cell Supernatant Screening

[1292] A large number of mammalian receptors exist for which there remains, as yet, no cognate activating ligand (agonist). Thus, active ligands for these receptors may not be included within the ligands banks as identified to date. Accordingly, the polypeptides of the invention can also be functionally screened (using calcium, cAMP, microphysiometer, oocyte electrophysiology, etc., functional screens) against tissue extracts to identify its natural ligands. Extracts that produce positive functional responses can be sequentially subfractionated until an activating ligand is isolated and identified.

### Example 52

### Calcium and cAMP Functional Assays

[1293] Seven transmembrane receptors which are expressed in HEK 293 cells have been shown to be coupled functionally to activation of PLC and calcium mobilization and/or cAMP stimulation or inhibition. Basal calcium levels in the HEK 293 cells in receptor-transfected or vector control cells were observed to be in the normal, 100 nM to 200 nM, range. HEK 293 cells expressing recombinant receptors are loaded with flira 2 and in a single day >150 selected ligands or tissue/cell extracts are evaluated for agonist induced calcium mobilization. Similarly, HEK 293 cells expressing recombinant receptors are evaluated for the stimulation or inhibition of cAMP production using standard cAMP quantitation assays. Agonists presenting a calcium transient or cAMP fluctuation are tested in vector control cells to determine if the response is unique to the transfected cells expressing receptor.

### Example 53

### ATP-binding Assay

[1294] The following assay may be used to assess ATP-binding activity of polypeptides of the invention.

[1295] ATP-binding activity of the polypeptides of the invention may be detected using the ATP-binding assay described in U.S. Pat. No. 5,858,719, which is herein incorporated by reference in its entirety. Briefly, ATP-binding to polypeptides of the invention is measured via photoaffinity labeling with 8-azido-ATP in a competition assay. Reaction mixtures containing 1 mg/ml of the ABC transport protein of the present invention are incubated with varying concentrations of ATP, or the non-hydrolyzable ATP analog adenyl-5′-imidodiphosphate for 10 minutes at 4° C. A mixture of 8-azido-ATP (Sigma Chem. Corp., St. Louis, Mo.) plus 8-azido-ATP (³²P-ATP) (5 mCi/μmol, ICN, Irvine Calif.) is added to a final concentration of 100 μM and 0.5 ml aliquots are placed in the wells of a porcelain spot plate on ice. The plate is irradiated using a short wave 254 nm UV lamp at a distance of 2.5 cm from the plate for two one-minute intervals with a one-minute cooling interval in between. The reaction is stopped by addition of dithiothreitol to a final concentration of 2 mM. The incubations are subjected to SDS-PAGE electrophoresis, dried, and autoradiographed. Protein bands corresponding to the particular polypeptides of the invention are excised, and the radioactivity quantified. A decrease in radioactivity with increasing ATP or adenly-5′-imidodiphosphate provides a measure of ATP affinity to the polypeptides.

### Example 54

### Small Molecule Screening

[1296] This invention is particularly useful for screening therapeutic compounds by using the polypeptides of the invention, or binding fragments thereof, in any of a variety of drug screening techniques. The polypeptide or fragment employed in such a test may be affixed to a solid support, expressed on a cell surface, free in solution, or located intracellularly. One method of drug screening utilizes eukaryotic or prokaryotic host cells which are stably transformed with recombinant nucleic acids expressing the polypeptide or fragment. Drugs are screened against such transformed cells in competitive binding assays. One may measure, for example, the formulation of complexes between the agent being tested and polypeptide of the invention.

[1297] Thus, the present invention provides methods of screening for drugs or any other agents which affect activities mediated by the polypeptides of the invention. These methods comprise contacting such an agent with a polypeptide of the invention or fragment thereof and assaying for the presence of a complex between the agent and the polypeptide or fragment thereof, by methods well known in the art. In such a competitive binding assay, the agents to screen are typically labeled. Following incubation, free agent is separated from that present in bound form, and the amount of free or uncomplexed label is a measure of the ability of a particular agent to bind to the polypeptides of the invention.

[1298] Another technique for drug screening provides high throughput screening for compounds having suitable binding affinity to the polypeptides of the invention, and is described in great detail in European Patent Application 84/03564, published on Sep. 13, 1984, which is herein incorporated by reference in its entirety. Briefly stated, large numbers of different small molecule test compounds are synthesized on a solid substrate, such as plastic pins or some other surface. The test compounds are reacted with polypeptides of the invention and washed. Bound polypeptides are then detected by methods well known in the art. Purified polypeptides are coated directly onto plates for use in the aforementioned drug screening techniques. In addition, non-neutralizing antibodies may be used to capture the peptide and immobilize it on the solid support.

[1299] This invention also contemplates the use of competitive drug screening assays in which neutralizing antibodies capable of binding polypeptides of the invention specifically compete with a test compound for binding to the polypeptides or fragments thereof. In this manner, the antibodies are used to detect the presence of any peptide which shares one or more antigenic epitopes with a polypeptide of the invention.

### Example 55

### Phosphorylation Assay

[1300] In order to assay for phosphorylation activity of the polypeptides of the invention, a phosphorylation assay as described in U.S. Pat. No. 5,958,405 (which is herein incorporated by reference) is utilized. Briefly, phosphorylation activity may be measured by phosphorylation of a protein substrate using gamma-labeled ³²P-ATP and quantitation of the incorporated radioactivity using a gamma radioisotope counter. The polypeptides of the invention are incubated with the protein substrate, ³²P-ATP, and a kinase buffer. The ³²p incorporated into the substrate is then separated from free ³²P-ATP by electrophoresis, and the incorporated 32P is counted and compared to a negative control. Radioactivity counts above the negative control are indicative of phosphorylation activity of the polypeptides of the invention.

### Example 56

### Detection of Phosphorylation Activity (Activation) of the Polypeptides of the Invention in the Presence of Polypeptide Ligands

[1301] Methods known in the art or described herein may be used to determine the phosphorylation activity of the polypeptides of the invention. A preferred method of determining phosphorylation activity is by the use of the tyrosine phosphorylation assay as described in U.S. Pat. No. 5,817,471 (incorporated herein by reference).

### Example 57

### Identification of Signal Transduction Proteins that Interact with Polypeptides of the Present Invention

[1302] The purified polypeptides of the invention are research tools for the identification, characterization and purification of additional signal transduction pathway proteins or receptor proteins. Briefly, labeled polypeptides of the invention are useful as reagents for the purification of molecules with which it interacts. In one embodiment of affinity purification, polypeptides of the invention are covalently coupled to a chromatography column. Cell-free extract derived from putative target cells, such as carcinoma tissues, is passed over the column, and molecules with appropriate affinity bind to the polypeptides of the invention. The protein complex is recovered from the column, dissociated, and the recovered molecule subjected to N-terminal protein sequencing. This amino acid sequence is then used to identify the captured molecule or to design degenerate oligonucleotide probes for cloning the relevant gene from an appropriate cDNA library.

### Example 58

### IL-6 Bioassay

[1303] To test the proliferative effects of the polypeptides of the invention, the IL-6 Bioassay as described by Marz et al. is utilized (Proc. Natl. Acad. Sci., U.S.A., 95:3251-56 (1998), which is herein incorporated by reference). Briefly, IL-6 dependent B9 murine cells are washed three times in IL-6 free medium and plated at a concentration of 5,000 cells per well in 50 μl, and 50 μl of the IL-6-like polypeptide is added. After 68 hrs. at 37° C., the number of viable cells is measured by adding the tetrazolium salt thiazolyl blue (MTT) and incubating for a further 4 hrs. at 37° C. B9 cells are lysed by SDS and optical density is measured at 570 nm. Controls containing IL-6 (positive) and no cytokine (negative) are utilized. Enhanced proliferation in the test sample(s) relative to the negative control is indicative of proliferative effects mediated by polypeptides of the invention.

### Example 59

### Support of Chicken Embryo Neuron Survival

[1304] To test whether sympathetic neuronal cell viability is supported by polypeptides of the invention, the chicken embryo neuronal survival assay of Senaldi et al is utilized (Proc. Natl. Acad. Sci., U.S.A., 96:11458-63 (1998), which is herein incorporated by reference). Briefly, motor and sympathetic neurons are isolated from chicken embryos, resuspended in L15 medium (with 10% FCS, glucose, sodium selenite, progesterone, conalbumin, putrescine, and insulin; Life Technologies, Rockville, Md.) and Dulbecco's modified Eagles medium [with 10% FCS, glutamine, penicillin, and 25 mM Hepes buffer (pH 7.2); Life Technologies, Rockville, MD.], respectively, and incubated at 37° C. in 5% CO₂ in the presence of different concentrations of the purified IL-6-like polypeptide, as well as a negative control lacking any cytokine. After 3 days, neuron survival is determined by evaluation of cellular morphology, and through the use of the calorimetric assay of Mosmann (Mosmann, T., J. Immunol. Methods, 65:55-63 (1983)). Enhanced neuronal cell viability as compared to the controls lacking cytokine is indicative of the ability of the inventive purified IL-6-like polypeptide(s) to enhance the survival of neuronal cells.

### Example 60

### Assay for Phosphatase Activity

[1305] The following assay may be used to assess serine/threonine phosphatase (PTPase) activity of the polypeptides of the invention.

[1306] In order to assay for serine/threonine phosphatase (PTPase) activity, assays can be utilized which are widely known to those skilled in the art. For example, the serine/threonine phosphatase (PSPase) activity is measured using a PSPase assay kit from New England Biolabs, Inc. Myelin basic protein (MyBP), a substrate for PSPase, is phosphorylated on serine and threonine residues with cAMP-dependent Protein Kinase in the presence of [³²P]ATP. Protein serine/threonine phosphatase activity is then determined by measuring the release of inorganic phosphate from 32P-labeled MyBP.

### Example 61

### Interaction ofSerine/Threonine Phosphatases with Other Proteins

[1307] The polypeptides of the invention with serine/threonine phosphatase activity as determined in Example 60 are research tools for the identification, characterization and purification of additional interacting proteins or receptor proteins, or other signal transduction pathway proteins. Briefly, labeled polypeptide(s) of the invention is useful as a reagent for the purification of molecules with which it interacts. In one embodiment of affinity purification, polypeptide of the invention is covalently coupled to a chromatography column. Cell-free extract derived from putative target cells, such as neural or liver cells, is passed over the column, and molecules with appropriate affinity bind to the polypeptides of the invention. The polypeptides of the invention -complex is recovered from the column, dissociated, and the recovered molecule subjected to N-terminal protein sequencing. This amino acid sequence is then used to identify the captured molecule or to design degenerate oligonucleotide probes for cloning the relevant gene from an appropriate cDNA library.

### Example 62

### Assaying for Heparanase Activity

[1308] In order to assay for heparanase activity of the polypeptides of the invention, the heparanase assay described by Vlodavsky et al is utilized (Vlodavsky, I., et al., Nat. Med., 5:793-802 (1999)). Briefly, cell lysates, conditioned media or intact cells (1×10⁶ cells per 35-mm dish) are incubated for 18 hrs at 37° C., pH 6.2-6.6, with ³⁵S-labeled ECM or soluble ECM derived peak I proteoglycans. The incubation medium is centrifuged and the supernatant is analyzed by gel filtration on a Sepharose CL-6B column (0.9×30 cm). Fractions are eluted with PBS and their radioactivity is measured. Degradation fragments of heparan sulfate side chains are eluted from Sepharose 6B at 0.5<Kₐᵥ<0.8 (peak II). Each experiment is done at least three times. Degradation fragments corresponding to “peak II,” as described by Vlodavsky et al., is indicative of the activity of the polypeptides of the invention in cleaving heparan sulfate.

### Example 63

### Immobilization of Biomolecules

[1309] This example provides a method for the stabilization of polypeptides of the invention in non-host cell lipid bilayer constucts (see, e.g., Bieri et al., Nature Biotech 17:1105-1108 (1999), hereby incorporated by reference in its entirety herein) which can be adapted for the study of polypeptides of the invention in the various functional assays described above. Briefly, carbohydrate-specific chemistry for biotinylation is used to confine a biotin tag to the extracellular domain of the polypeptides of the invention, thus allowing uniform orientation upon immobilization. A 50 uM solution of polypeptides of the invention in washed membranes is incubated with 20 mM NaIO4 and 1.5 mg/ml (4mM) BACH or 2 mg/ml (7.5mM) biotin-hydrazide for 1 hr at room temperature (reaction volume, 150 ul). Then the sample is dialyzed (Pierce Slidealizer Cassett, 10 kDa cutoff; Pierce Chemical Co., Rockford Ill.) at 4° C. first for 5 h, exchanging the buffer after each hour, and finally for 12 h against 500 ml buffer R (0.15 M NaCl, 1 mM MgCl2, 10 mM sodium phosphate, pH7). Just before addition into a cuvette, the sample is diluted 1:5 in buffer ROG50 (Buffer R supplemented with 50 mM octylglucoside).

### Example 64

### TAQMAN

[1310] Quantitative PCR (QPCR). Total RNA from cells in culture are extracted by Trizol separation as recommended by the supplier (LifeTechnologies). (Total RNA is treated with DNase I (Life Technologies) to remove any contaminating genomic DNA before reverse transcription.) Total RNA (50 ng) is used in a one-step, 50 ul, RT-QPCR, consisting of Taqman Buffer A (Perkin-Elmer; 50 mM KCl/10 mM Tris, pH 8.3), 5.5 MM MgCl₂, 240 μM each dNTP, 0.4 units RNase inhibitor(Promega), 8%glycerol, 0.012% Tween-20, 0.05% gelatin, 0.3 uM primers, 0.1 uM probe, 0.025 units Amplitaq Gold (Perkin-Elmer) and 2.5 units Superscript II reverse transcriptase (Life Technologies). As a control for genomic contamination, parallel reactions are setup without reverse transcriptase. The relative abundance of (unknown) and 18S RNAs are assessed by using the Applied Biosystems Prism 7700 Sequence Detection System (Livak, K. J., Flood, S. J., Marmaro, J., Giusti, W. & Deetz, K. (1995) PCR Methods Appl. 4, 357-362). Reactions are carried out at 48° C. for 30 min, 95° C. for 10 min, followed by 40 cycles of 95° C. for 15s, 60° C. for 1 min. Reactions are performed in triplicate.

[1311] Primers (f & r) and FRET probes sets are designed using Primer Express Software (Perkin-Elmer). Probes are labeled at the 5′-end with the reporter dye 6-FAM and on the 3′-end with the quencher dye TAMRA (Biosource International, Camarillo, Calif. or Perkin-Elmer).

### Example 65

### Assays for Metalloproteinase Activity

[1312] Metalloproteinases (EC 3.4.24.-) are peptide hydrolases which use metal ions, such as Zn²⁺, as the catalytic mechanism. Metalloproteinase activity of polypeptides of the present invention can be assayed according to the following methods.

[1313] Proteolysis of Alpha-2-macroglobulin

[1314] To confirm protease activity, purified polypeptides of the invention are mixed with the substrate alpha-2-macroglobulin (0.2 unit/ml; Boehringer Mannheim, Germany) in 1× assay buffer (50 mM HEPES, pH 7.5, 0.2 M NaCl, 10 mM CaCI₂, 25 μM ZnCl₂ and 0.05% Brij-35) and incubated at 37° C. for 1-5 days. Trypsin is used as positive control. Negative controls contain only alpha-2-macroglobulin in assay buffer. The samples are collected and boiled in SDS-PAGE sample buffer containing 5% 2-mercaptoethanol for 5-min, then loaded onto 8% SDS-polyacrylamide gel. After electrophoresis the proteins are visualized by silver staining. Proteolysis is evident by the appearance of lower molecular weight bands as compared to the negative control.

[1315] Inhibition of Alpha-2-macroglobulin Proteolysis by Inhibitors of Metalloproteinases

[1316] Known metalloproteinase inhibitors (metal chelators (EDTA, EGTA, AND HgCl₂), peptide metalloproteinase inhibitors (TIMP-1 and TIMP-2), and commercial small molecule MMP inhibitors) are used to characterize the proteolytic activity of polypeptides of the invention. The three synthetic MMP inhibitors used are: MMP inhibitor I, [IC₅₀=1.0 μM against MMP-1 and MMP-8; IC₅₀=30 μM against MMP-9; IC₅₀=150 μM against MMP-3]; MMP-3 (stromelysin-1) inhibitor I [IC₅₀=5 μM against MMP-3], and MMP-3 inhibitor II [K₅₀=130 nM against MMP-3]; inhibitors available through Calbiochem, catalog # 444250, 444218, and 444225, respectively). Briefly, different concentrations of the small molecule MMP inhibitors are mixed with purified polypeptides of the invention (50 μg/ml) in 22.9 μl of 1× HEPES buffer (50 mM HEPES, pH 7.5, 0.2 M NaCl, 10 mM CaCI₂, 25 μM ZnCl₂ and 0.05%Brij-35) and incubated at room temperature (24° C.) for 2-hr, then 7.1 μl of substrate alpha-2-macroglobulin (0.2 unit/ml) is added and incubated at 37° C. for 20-hr. The reactions are stopped by adding 4× sample buffer and boiled immediately for 5 minutes. After SDS-PAGE, the protein bands are visualized by silver stain. Synthetic Fluorogenic Peptide Substrates Cleavage Assay

[1317] The substrate specificity for polypeptides of the invention with demonstrated metalloproteinase activity can be determined using synthetic fluorogenic peptide substrates (purchased from BACHEM Bioscience Inc). Test substrates include, M-1985, M-2225, M-2105, M-2110, and M-2255. The first four are MMP substrates and the last one is a substrate of tumor necrosis factor-α (TNF-α) converting enzyme (TACE). All the substrates are prepared in 1:1 dimethyl sulfoxide (DMSO) and water. The stock solutions are 50-500 μM. Fluorescent assays are performed by using a Perkin Elmer LS 50B luminescence spectrometer equipped with a constant temperature water bath. The excitation λ is 328 nm and the emission λ is 393 nm. Briefly, the assay is carried out by incubating 176 μl 1× HEPES buffer (0.2 M NaCl, 10 mM CaCl₂, 0.05% Brij-35 and 50 mM HEPES, pH 7.5) with 4 μl of substrate solution (50 μM) at 25° C. for 15 minutes, and then adding 20 μl of a purified polypeptide of the invention into the assay cuvett. The final concentration of substrate is 1 μM. Initial hydrolysis rates are monitored for 30-min.

### Example 66

### Characterization of the cDNA Contained in a Deposited Plasmid

[1318] The size of the cDNA insert contained in a deposited plasmid may be routinely determined using techniques known in the art, such as PCR amplification using synthetic primers hybridizable to the 3′ and 5′ ends of the cDNA sequence. For example, two primers of 17-30 nucleotides derived from each end of the CDNA (i.e., hybridizable to the absolute 5′ nucleotide or the 3′ nucleotide end of the sequence of SEQ ID NO:X, respectively) are synthesized and used to amplify the cDNA using the deposited cDNA plasmid as a template. The polymerase chain reaction is carried out under routine conditions, for instance, in 25 ul of reaction mixture with 0.5 ug of the above cDNA template. A convenient reaction mixture is 1.5-5 mM MgCl₂, 0.01% (w/v) gelatin, 20 uM each of dATP, dCTP, dGTP, dTTP, 25 pmol of each primer and 0.25 Unit of Taq polymerase. Thirty five cycles of PCR (denaturation at 94 degree C. for 1 min; annealing at 55 degree C. for 1 min; elongation at 72 degree C. for 1 min) are performed with a Perkin-Elmer Cetus automated thermal cycler. The amplified product is analyzed by agarose gel electrophoresis. The PCR product is verified to be the selected sequence by subcloning and sequencing the DNA product.

[1319] Use of the above methodologies and/or other methodologies known in the art generates fragments from the clone corresponding to the approximate fragments described in Table 8, below. Accordingly, Table 8 provides a physical characterization of certain clones encompassed by the invention. The first column provides the unique clone identifier, “Clone ID NO:Z”, for cDNA clones of the invention, as described in Table 1A. The second column provides the approximate size of the cDNA insert contained in the corresponding cDNA clone.

TABLE 8

| | cDNA |
|---|---|
| Clone ID | Insert |
| NO: Z | Size: |
| HMMAB49 | 700 |
| HSICX21 | 900 |
| HWBCQ57 | 1000 |
| HOECV83 | 400 |
| HWACV74 | 1800 |
| HFPCT53 | 1100 |
| HUVHP54 | 1900 |
| HNHHF46 | 1400 |
| HCWDL45 | 1200 |
| HDPTQ41 | 700 |
| HDPXN01 | 400 |
| HCFCV92 | 1000 |
| HHSGV13 | 1300 |
| HTXGF27 | 1300 |
| HWBBR65 | 2300 |
| HPIAU71 | 700 |
| HYABB43 | 1200 |
| HHPDX35 | 2700 |
| HHAMF38 | 2100 |
| HNTRL43 | 1600 |
| HOFNC80 | 1900 |
| HDPXL24 | 3100 |
| HACCH94 | 1400 |
| HTEOF80 | 1700 |
| H7TBC95 | 700 |
| HSLHT48 | 1700 |
| HE2KL28 | 900 |
| HCFND04 | 1800 |
| HLDBM06 | 1400 |
| HDPMT22 | 2000 |
| HE9RE21 | 1600 |
| HKACI15 | 1900 |
| HSSKD85 | 1100 |
| HETEY43 | 2300 |
| HETIY94 | 2300 |
| HLCMP75 | 1500 |
| HBGMZ39 | 500 |
| HSDFT51 | 1400 |
| HS2SH04 | 1400 |
| HAJAV28 | 1600 |
| HSSGK13 | 700 |
| HNTOA59 | 2800 |
| HNGEO79 | 1600 |
| HHATR09 | 900 |
| HYABP53 | 1500 |
| HSXBV89 | 2200 |
| HTSHM38 | 2300 |
| HLDQK77 | 2900 |
| HNTCU89 | 1800 |
| HCGME42 | 1600 |
| HLDBL95 | 2500 |
| HAPPY24 | 1300 |
| HFKFL92 | 1000 |
| HWAEU35 | 1100 |
| HMSNC17 | 3800 |
| HLHCR16 | 3800 |
| HSDHB12 | 700 |
| HOFMP09 | 1400 |
| HFPEL47 | 2000 |
| HFIHF63 | 2100 |
| HLWAR77 | 1300 |
| HBCBF11 | 1900 |
| HFKHD91 | 1300 |
| HE8AM92 | 2000 |
| HUSXE73 | 2200 |
| HNFCS26 | 1700 |
| HAPOI67 | 2300 |
| HE8NI05 | 3000 |

[1320] It will be clear that the invention may be practiced otherwise than as particularly described in the foregoing description and examples. Numerous modifications and variations of the present invention are possible in light of the above teachings and, therefore, are within the scope of the appended claims.

[1321] The entire disclosure of each document cited (including patents, patent applications, journal articles, abstracts, laboratory manuals, books, or other disclosures) in the Background of the Invention, Detailed Description, and Examples is hereby incorporated herein by reference. In addition, the CD-R copy of the sequence listing submitted herewith and the corresponding computer readable form are both incorporated herein by reference in their entireties. The specification and sequence listing of each of the following U.S. applications are herein incorporated by reference in their entirety: Application No. 60/179,065, filed on Jan. 31, 2000; Application No. 60/180,628, filed on Feb. 4, 2000; Application No. 60/214,886, filed on Jun. 28, 2000; Application No. 60/217,487, filed on Jul. 11, 2000; Application No. 60/225,758, filed on Aug. 14, 2000; Application No. 60/220,963, filed on Jul. 26, 2000; Application No. 60/217,496, filed on Jul. 11, 2000; Application No. 60/225,447, filed on Aug. 14, 2000; Application No. 60/218,290, filed on Jul. 14, 2000; Application No. 60/225,757, filed on Aug. 14, 2000; Application No. 60/226,868, filed on Aug. 22, 2000; Application No. 60/216,647, filed on Jul. 7, 2000; Application No. 60/225,267, filed on Aug. 14, 2000; Application No. 60/216,880, filed on Jul. 7, 2000; Application No. 60/225,270, filed on Aug. 14, 2000; Application No. 60/251,869, filed on Dec. 8, 2000; Application No. 60/235,834, filed on Sep. 7, 2000; Application No. 60/234,274, filed on Sep. 21, 2000; Application No. 60/234,223, filed on Sep. 21, 2000; Application No. 60/228,924, filed on Aug. 30, 2000; Application No. 60/224,518, filed on Aug. 14, 2000; Application No. 60/236,369, filed on Sep. 29, 2000; Application No. 60/224,519, filed on Aug. 14, 2000; Application No. 60/220,964, filed on Jul. 26, 2000; Application No. 60/241,809, filed on Oct. 20, 2000; Application No. 60/249,299, filed on Nov. 17, 2000; Application No. 60/236,327, filed on Sep. 29, 2000; Application No. 60/241,785, filed on Oct. 20, 2000; Application No. 60/244,617, filed on Nov. 1, 2000; Application No. 60/225,268, filed on Aug. 14, 2000; Application No. 60/236,368, filed on Sep. 29, 2000; Application No. 60/251,856, filed on Dec. 8, 2000; Application No. 60/251,868, filed on Dec. 8, 2000; Application No. 60/229,344, filed on Sep. 1, 2000; Application No. 60/234,997, filed on Sep. 25, 2000; Application No. 60/229,343, filed on Sep. 1, 2000; Application No. 60/229,345, filed on Sep. 1, 2000; Application No. 60/229,287, filed on Sep. 1, 2000; Application No. 60/229,513, filed on Sep. 5, 2000; Application No. 60/231,413, filed on Sep. 8, 2000; Application No. 60/229,509, filed on Sep. 5, 2000; Application No. 60/236,367, filed on Sep. 29, 2000; Application No. 60/237,039, filed on Oct. 2, 2000; Application No. 60/237,038, filed on Oct. 2, 2000; Application No. 60/236,370, filed on Sep. 29, 2000; Application No. 60/236,802, filed on Oct. 2, 2000; Application No. 60/237,037, filed on Oct. 2, 2000; Application No. 60/237,040, filed on Oct. 2, 2000; Application No. 60/240,960, filed on Oct. 20, 2000; Application No. 60/239,935, filed on Oct. 13, 2000; Application No. 60/239,937, filed on Oct. 13, 2000; Application No. 60/241,787, filed on Oct. 20, 2000; Application No. 60/246,474, filed on Nov. 8, 2000; Application No. 60/246,532, filed on Nov. 8, 2000; Application No. 60/249,216, filed on Nov. 17, 2000; Application No. 60/249,210, filed on Nov. 17, 2000; Application No. 60/226,681, filed on Aug. 22, 2000; Application No. 60/225,759, filed on Aug. 14, 2000; Application No. 60/225,213, filed on Aug. 14, 2000; Application No. 60/227,182, filed on Aug. 14, 2000; Application No. 60/225,214, filed on Aug. 14, 2000; Application No. 60/235,836, filed on Sep. 27, 2000; Application No. 60/230,438, filed on Sep. 6, 2000; Application No. 60/215,135, filed on Jun. 30, 2000; Application No. 60/225,266, filed on Aug. 14, 2000; Application No. 60/249,218, filed on Nov. 17, 2000; Application No. 60/249,208, filed on Nov. 17, 2000; Application No. 60/249,213, filed on Nov. 17, 2000; Application No. 60/249,212, filed on Nov. 17, 2000; Application No.60/249,207, filed on Nov. 17, 2000; Application No. 60/249,245, filed on Nov. 17, 2000; Application No. 60/249,244, filed on Nov. 17, 2000; Application No.60/249,217, filed on Nov. 17, 2000; Application No. 60 /249,211, filed on Nov. 17, 2000; Application No. 60/249,215, filed on Nov. 17, 2000; Application No. 60/249,264, filed on Nov. 17, 2000; Application No. 60/249,214, filed on Nov. 17, 2000; Application No. 60/249,297, filed on Nov. 17, 2000; Application No. 60/232,400, filed on Sep. 14, 2000; Application No. 60/231,242, filed on Sep. 8, 2000; Application No. 60/232,081, filed on Sep. 8, 2000; Application No. 60/232,080, filed on Sep. 8, 2000; Application No. 60/231,414, filed on Sep. 8, 2000; Application No. 60/231,244, filed on Sep. 8, 2000; Application No. 60/233,064, filed on Sep. 14, 2000; Application No. 60/233,063, filed on Sep. 14, 2000; Application No. 60/232,397, filed on Sep. 14, 2000; Application No. 60/232,399, filed on Sep. 14, 2000; Application No. 60/232,401, filed on Sep. 14, 2000; Application No. 60/241,808, filed on Oct. 20, 2000; Application No. 60/241,826, filed on Oct. 20, 2000; Application No. 60/241,786, filed on Oct. 20, 2000; Application No. 60/241,221, filed on Oct. 20, 2000; Application No. 60/246,475, filed on Nov. 8, 2000; Application No. 60/231,243, filed on Sep. 8, 2000; Application No. 60/233,065, filed on Sep. 14, 2000; Application No. 60/232,398, filed on Sep. 14, 2000; Application No. 60/234,998, filed on Sep. 25, 2000; Application No. 60/246,477, filed on Nov. 8, 2000; Application No. 60/246,528, filed on Nov. 8, 2000; Application No. 60/246,525, filed on Nov. 8, 2000; Application No. 60/246,476, filed on Nov. 8, 2000; Application No. 60/246,526, filed on Nov. 8, 2000; Application No. PT172, filed on Nov. 17, 2000; Application No. 60/246,527, filed on Nov. 8, 2000; Application No. 60/246,523, filed on Nov. 8, 2000; Application No. 60/246,524, filed on Nov. 8, 2000; Application No. 60/246,478, filed on Nov. 8, 2000; Application No. 60/246,609, filed on Nov. 8, 2000; Application No.60/246,613, filed on Nov. 8, 2000; Application No.60/249,300, filed on Nov. 17, 2000; Application No. 60/249,265, filed on Nov. 17, 2000; Application No. 60/246,610, filed on Nov. 17, 2000; Application No. 60/246,611, filed on Nov. 8, 2000; Application No. 60/230,437, filed on Sep. 6, 2000; Application No. 60/251,990, filed on Dec. 8, 2000; Application No. 60/251,988, filed on Dec. 5, 2000; Application No. 60/251,030, filed on Dec. 5, 2000; Application No. 60/251,479, filed on Dec. 6, 2000; Application No. PJ005, filed on Dec. 5, 2000; Application No. PJ006, filed on Dec. 1, 2000; Application No. 60/251,989, filed on Dec. 8, 2000; Application No. 60/250,391, filed on Dec. 1, 2000; and Application No. 60/254,097, filed on Dec. 11, 2000.

[1322] Moreover, the microfiche copy and the corresponding computer readable form of the Sequence Listing of U.S. Application Ser. No. 60/179,065, and the hard copy of and the corresponding computer readable form of the Sequence Listing of U.S. Application Ser. No. 60/180,628 are also incorporated herein by reference in their entireties.

What is claimed is:

1. An isolated nucleic acid molecule comprising a polynucleotide having a nucleotide sequence at least 95% identical to a sequence selected from the group consisting of:
(a) a polynucleotide fragment of SEQ ID NO:X or a polynucleotide fragment of the cDNA sequence contained in Clone ID NO:Z, which is hybridizable to SEQ ID NO:X;
(b) a polynucleotide encoding a polypeptide fragment of SEQ ID NO:Y or a polypeptide fragment encoded by the cDNA sequence contained in cDNA Clone ID NO:Z, which is hybridizable to SEQ ID NO:X;
(c) a polynucleotide encoding a polypeptide fragment of a polypeptide encoded by SEQ ID NO:X or a polypeptide fragment encoded by the cDNA sequence contained in cDNA Clone ID NO:Z, which is hybridizable to SEQ ID NO:X;
(d) a polynucleotide encoding a polypeptide domain of SEQ ID NO:Y or a polypeptide domain encoded by the cDNA sequence contained in cDNA Clone ID NO:Z, which is hybridizable to SEQ ID NO:X;
(e) a polynucleotide encoding a polypeptide epitope of SEQ ID NO:Y or a polypeptide epitope encoded by the cDNA sequence contained in cDNA Clone ID NO:Z, which is hybridizable to SEQ ID NO:X;
(f) a polynucleotide encoding a polypeptide of SEQ ID NO:Y or the cDNA sequence contained in cDNA Clone ID NO:Z, which is hybridizable to SEQ ID NO:X, having biological activity;
(g) a polynucleotide which is a variant of SEQ ID NO:X;
(h) a polynucleotide which is an allelic variant of SEQ ID NO:X;
(i) a polynucleotide which encodes a species homologue of the SEQ ID NO:Y;
(j) a polynucleotide capable of hybridizing under stringent conditions to any one of the polynucleotides specified in (a)-(i), wherein said polynucleotide does not hybridize under stringent conditions to a nucleic acid molecule having a nucleotide sequence of only A residues or of only T residues.

2. The isolated nucleic acid molecule of claim 1, wherein the polynucleotide fragment comprises a nucleotide sequence encoding a protein.

3. The isolated nucleic acid molecule of claim 1, wherein the polynucleotide fragment comprises a nucleotide sequence encoding the sequence identified as SEQ ID NO:Y or the polypeptide encoded by the cDNA sequence contained in cDNA Clone ID NO:Z, which is hybridizable to SEQ ID NO:X.

4. The isolated nucleic acid molecule of claim 1, wherein the polynucleotide fragment comprises the entire nucleotide sequence of SEQ ID NO:X or the cDNA sequence contained in cDNA Clone ID NO:Z, which is hybridizable to SEQ ID NO:X.

5. The isolated nucleic acid molecule of claim 2, wherein the nucleotide sequence comprises sequential nucleotide deletions from either the C-terminus or the N-terminus.

6. The isolated nucleic acid molecule of claim 3, wherein the nucleotide sequence comprises sequential nucleotide deletions from either the C-terminus or the N-terminus.

7. A recombinant vector comprising the isolated nucleic acid molecule of claim 1.

8. A method of making a recombinant host cell comprising the isolated nucleic acid molecule of claim 1.

9. A recombinant host cell produced by the method of claim 8.

10. The recombinant host cell of claim 9 comprising vector sequences.

11. An isolated polypeptide comprising an amino acid sequence at least 90% identical to a sequence selected from the group consisting of:
(a) a polypeptide fragment of SEQ ID NO:Y or the encoded sequence contained in cDNA Clone ID NO:Z;
(b) a polypeptide fragment of SEQ ID NO:Y or the encoded sequence contained in cDNA Clone ID NO:Z, having biological activity;
(c) a polypeptide domain of SEQ ID NO:Y or the encoded sequence contained in cDNA Clone ID NO:Z;
(d) a polypeptide epitope of SEQ ID NO:Y or the encoded sequence contained in cDNA Clone ID NO:Z;
(e) a full length protein of SEQ ID NO:Y or the encoded sequence contained in cDNA Clone ID NO:Z;
(f) a variant of SEQ ID NO:Y;
(g) an allelic variant of SEQ ID NO:Y; or
(h) a species homologue of the SEQ ID NO:Y.

12. The isolated polypeptide of claim 11, wherein the full length protein comprises sequential amino acid deletions from either the C-terminus or the N-terminus.

13. An isolated antibody that binds specifically to the isolated polypeptide of claim 11.

14. A recombinant host cell that expresses the isolated polypeptide of claim 11.

15. A method of making an isolated polypeptide comprising:
(a) culturing the recombinant host cell of claim 14 under conditions such that said polypeptide is expressed; and
(b) recovering said polypeptide.

16. The polypeptide produced by claim 15.

17. A method for preventing, treating, or ameliorating a medical condition, comprising administering to a mammalian subject a therapeutically effective amount of the polynucleotide of claim 1.

18. A method of diagnosing a pathological condition or a susceptibility to a pathological condition in a subject comprising:
(a) determining the presence or absence of a mutation in the polynucleotide of claim 1; and
(b) diagnosing a pathological condition or a susceptibility to a pathological condition based on the presence or absence of said mutation.

19. A method of diagnosing a pathological condition or a susceptibility to a pathological condition in a subject comprising:
(a) determining the presence or amount of expression of the polypeptide of claim 11 in a biological sample; and
(b) diagnosing a pathological condition or a susceptibility to a pathological condition based on the presence or amount of expression of the polypeptide.

20. A method for identifying a binding partner to the polypeptide of claim 11 comprising:
(a) contacting the polypeptide of claim 11 with a binding partner; and
(b) determining whether the binding partner effects an activity of the polypeptide.

21. The gene corresponding to the cDNA sequence of SEQ ID NO:Y.

22. A method of identifying an activity in a biological assay, wherein the method comprises:
(a) expressing SEQ ID NO:X in a cell;
(b) isolating the supernatant;
(c) detecting an activity in a biological assay; and identifying the protein in the supernatant having the activity.

23. The product produced by the method of claim 20.

24. A method for preventing, treating, or ameliorating a medical condition, comprising administering to a mammalian subject a therapeutically effective amount of the polypeptide of claim 11.

The application's sequence listing, which the Patent Office published only in electronic form, follows.

SEQUENCE LISTING (939 sequences)

SEQ ID NO: 1 - DNA, 733 bp, Homo sapiens
gggatccggagcccaaatcttctgacaaaactcacacatgcccaccgtgcccagcacctgaattcgagggtgcaccgtcagtcttcctcttccccccaaaacccaaggacaccctcatgatctcccggactcctgaggtcacatgcgtggtggtggacgtaagccacgaagaccctgaggtcaagttcaactggtacgtggacggcgtggaggtgcataatgccaagacaaagccgcgggaggagcagtacaacagcacgtaccgtgtggtcagcgtcctcaccgtcctgcaccaggactggctgaatggcaaggagtacaagtgcaaggtctccaacaaagccctcccaacccccatcgagaaaaccatctccaaagccaaagggcagccccgagaaccacaggtgtacaccctgcccccatcccgggatgagctgaccaagaaccaggtcagcctgacctgcctggtcaaaggcttctatccaagcgacatcgccgtggagtgggagagcaatgggcagccggagaacaactacaagaccacgcctcccgtgctggactccgacggctccttcttcctctacagcaagctcaccgtggacaagagcaggtggcagcaggggaacgtcttctcatgctccgtgatgcatgaggctctgcacaaccactacacgcagaagagcctctccctgtctccgggtaaatgagtgcgacggccgcgactctagaggat

SEQ ID NO: 2 - protein, 5 aa, Homo sapiens
  Site (3): Xaa equals any of the twenty naturally ocurring L-amino acids
WSXWS

SEQ ID NO: 3 - DNA, 86 bp, Artificial Sequence
  Primer_Bind: Synthetic sequence with 4 tandem copies of the GAS binding site found in the IRF1 promoter (Rothman et al., Immunity 1:457-468 (1994)), 18 nucleotides complementary to the SV40 early promoter, and a Xho I restriction site.
gcgcctcgagatttccccgaaatctagatttccccgaaatgatttccccgaaatgatttccccgaaatatctgccatctcaattag

SEQ ID NO: 4 - DNA, 27 bp, Artificial Sequence
  Primer_Bind: Synthetic sequence complementary to the SV40 promter; includes a Hind III restriction site.
gcggcaagctttttgcaaagcctaggc

SEQ ID NO: 5 - DNA, 271 bp, Artificial Sequence
  Protein_Bind: Synthetic promoter for use in biological assays; includes GAS binding sites found in the IRF1 promoter (Rothman et al., Immunity 1:457-468 (1994)).
ctcgagatttccccgaaatctagatttccccgaaatgatttccccgaaatgatttccccgaaatatctgccatctcaattagtcagcaaccatagtcccgcccctaactccgcccatcccgcccctaactccgcccagttccgcccattctccgccccatggctgactaattttttttatttatgcagaggccgaggccgcctcggcctctgagctattccagaagtagtgaggaggcttttttggaggcctaggcttttgcaaaaagctt

SEQ ID NO: 6 - DNA, 32 bp, Artificial Sequence
  Primer_Bind: Synthetic primer complementary to human genomic EGR-1 promoter sequence (Sakamoto et al., Oncogene 6:867-871 (1991)); includes a Xho I restriction site.
gcgctcgagggatgacagcgatagaaccccgg

SEQ ID NO: 7 - DNA, 31 bp, Artificial Sequence
  Primer_Bind: Synthetic primer complementary to human genomic EGR-1 promoter sequence (Sakamoto et al., Oncogene 6:867-871 (1991)); includes a Hind III restriction site.
gcgaagcttcgcgactccccggatccgcctc

SEQ ID NO: 8 - DNA, 12 bp, Homo sapiens
ggggactttccc

SEQ ID NO: 9 - DNA, 73 bp, Artificial Sequence
  Primer_Bind: Synthetic primer with 4 tandem copies of the NF-KB binding site (GGGGACTTTCCC), 18 nucleotides complementary to the 5' end of the SV40 early promoter sequence, and a XhoI restriction site.
gcggcctcgaggggactttcccggggactttccggggactttccgggactttccatcctgccatctcaattag

SEQ ID NO: 10 - DNA, 256 bp, Artificial Sequence
  Protein_Bind: Synthetic promoter for use in biological assays; includes NF-KB binding sites.
ctcgaggggactttcccggggactttccggggactttccgggactttccatctgccatctcaattagtcagcaaccatagtcccgcccctaactccgcccatcccgcccctaactccgcccagttccgcccattctccgccccatggctgactaattttttttatttatgcagaggccgaggccgcctcggcctctgagctattccagaagtagtgaggaggcttttttggaggcctaggcttttgcaaaaagctt

SEQ ID NO: 11 - DNA, 761 bp, Homo sapiens
ggcacgaggtggtttaagataacaattttaatctcacaatttattttgaatacaggcatgatttagctgtgtcctttggttcagtatctcttcaaagctgtaatcaggtttttcatgtgtttgtcatcaactgaaagattgactgagtatggttctgagatctctcaggtgattattggcagaattaagttccttttcgattcttggtcttatttcttcacccatctactatagtgcattcttgccatgcagccctttttatggagcaagtcacaatacagcagcttgcttcattagggcaagcaagcaagacaagctgcagcaaatgcaagtaacatggaagtctttataatctaatcatggaattgacatagttaaaaacaaatcattaggtaggctccaaattgatcagaacatggttattggacaaaaccatgactgtcaggaggctgcatcatggggagccattttacaagcagcaccatgggtgttatgggggattttattacatttgttctgctcttaagagttgaaagtctttaaaaatgtgtaagtctgtcgtttgttcttgacttctgtcatgttttcaagaatgcattatgcaatgatgtagaatactgtttgtaaagtagttgtctagactctagtgaaaataattacagataatctcagttcatcaacgaatcggtatattaatgtcatatttaacagttataggaataaactaagcataataataaatgaaaaaaaaaaaaaaaaaa

SEQ ID NO: 12 - DNA, 675 bp, Homo sapiens
tcgacccacgcgtccgtgacaatttgggtaataatgagaaacaaaagggcactggagtcagggctactgggttcaaatttcaattctattacttgctgactgtgttactttggtatgttaatcaacttcagtaccatcaggaaaatgggagtgatagtactcacatagttgtgatgcatgaaaactgcttagcgcgtaagtgcttgataaatggaagctactataattatgtctgggaggtacatctttattattaacaccattatttttgctaacaagtattaacagcactgccacaataaagaatttactcccaagcgaggcatttacctcacttggatggggtataaaaagtaacagggaggccgggcgcggtggctcatgactgtaatcccagcactttgggaggccgaggtgggtggatcatgaggtcagcagttcgagaccagcctgaccaacatggtgaaaccctgtctctactcaaaatacaaaaaaattagctgggcgtggtggcgggtgcctgcaatcccagtgacttgggaggctgagaggcaggagactcgcttgaaaccagaaggcggaggttgcagtgagctgagattgcaccactgcactctagcctgggcattaagagcaaactctgtctcagaaaaaaaaaaaaaaaaaaaaaaaaaa

SEQ ID NO: 13 - DNA, 879 bp, Homo sapiens
gaatacttaactcagagttgtcacaagaatgaaataatatgatatctataaagcacccagcacaatgcctcgcacaatgcctgaacgttaacagttgttatgtctttagctatatttgtcatctgtgaattgaaacttattatacaagctatggttcctcttagctccaaacttctgagatcccatgacctttaagagcagctatgcagttcagaatattaagtttgcgctcctaatctctgcagacgtgctggcaggttgactgtctcccagtaatagggatgcagaactggccacagtcagggctggccaacaagggatgggatggcaagggaaccagtgggagactgtttacacctttgacttcctcttcacaggtcaaggcaggactgtagcattaggtctcagagatgcaatgaacaggacaaatacacttccccttcatctggacctgaggctctgggcaagtcagtaccagctggtttcttttgggagccatagaaactctggagctgttctaccgattcctcaagaagtaaaatataggccaggcgtggtggctcacgcctgttatcctaacactttgggaggctgaatcgggtggatcacaaggtcgggagttcgagaccagcctggccaatatggtgaaaccctgtctctactaaaaatacagaaattagctaggcatggtggcaggtgcctgtagtcccagctactcgggaggctgaggcaggagaatcgcttgaatccgggaggcggaggttgcagtgagccaagatggctcccttgaactccagcctgggcgacagagcaagactctgtctcaaaaaaaaaaaaaaaaaaaaaaaaaaaaaaaaaaaaaaaaaaaaaaaaaaaaaa

SEQ ID NO: 14 - DNA, 676 bp, Homo sapiens
ggatcctggtaaatttttgttccctcgctttgttagttttttattttattattttcaaaactattaaaagtaatgcaaattaagggttttgacttacattccttaggacatgaatggcaagatgaattttctcatattatggcaatgacagatccagcctttgggtcttcgggaagaccattgttggttttatcttgtatttctcaaggggatgtaaaaagaatgccctgtttttatttggctcatgagctgcatctgaatcttctaaatcacccatggctggtccaggatacagaggctgaaactctgactggttttttgaatggcattgagtggattcttgaagaagtggaatctaagcgtgcaagatgattctcttttcagatcttgggaactgaaaccatttgaaatttattactaaggtcgtgatgtgaatatttgctcagtcagcccaccttgtcctgcctttttgcagataggctttcatttggacagctataactgctgtgttttttatattatttttactctttaccataaatcaattacaagaaaagagtttcagtcctagtatttagccccaaaatgaacctttaaacatttttttggtaatttttatattttctgtctttttaaaaatattaaattctggaaaaaacaaaaaaaaaaaaaaaaa

SEQ ID NO: 15 - DNA, 502 bp, Homo sapiens
aaaggttttggtctttgttctaaatagttatgatttgtttttcttttctgttttgtctccagtaaaaaaaagcttatctttttattttctccctagcttcaaaatagatttttgtctggacataaaatctgttctttaatcttatatctctaaacaaaaccatatggcttactgtcacttctttggcaaggcttgagtttctttcaggatatgttgtaaagttcccataggctgtaagttgacctcacctatagagttagaattgtaaargagctacattcctattccaaaatttctgcaaagtgccagattgcagctatactcttctagagccccccataattacgtyctttttcttcccagaatcctcctcactcactctctattgcagccaagacatgtttggctagraccagggraagccatagraaataatgtaacmcmttattcagtgtcttgtatatttcaaatctaattgttatggaggggacctatactatat

SEQ ID NO: 16 - DNA, 749 bp, Homo sapiens
  SITE (701): n equals a,t,g, or c
  SITE (702): n equals a,t,g, or c
  SITE (737): n equals a,t,g, or c
gccctggctaggctacccatggcagccagccactcgggcccccaggcagccctggcttgtccatgccttcagtcctgctctgctctccctgtctgccactgtccaaaatgggaagcctgcccactctgcaaggctcacctccagtccagcctgtctcaccctctacacggggttgtgctttggtgtgcctgggtcagggtgaaccctgggttctagsggtgccgggaactgctctcctctgcaactggcccatccacaggcttcatccttcacttgggccttctgttcctgggccctttttagggtcaccttctttgagcctttggttaagatgatgaaacctctttcctaaagcaattgctttgacatacgtagatagttttgcataaattttaaggtgttcatagagcctaaaggccaaatataaaccaaaggtttttaaaaaagaaaaaaccgcggcctatacacagtgrcttcccctacctaaacatgaacttgttgttaccaagccaccactgcatttataaccaaatggccatgtaaaaaacacgacagcaacttcccagagccccatttaacaaggacttagtagataaaaatgccttttcttgaggggaaaatgcataaacatcttttattttccacactagaggaactgggacacgcttttcaccactgctgggactgggaaaaagttcagnnccctggtgggaccgccgacttgcaggtggaaccgnggggaggcaact

SEQ ID NO: 17 - DNA, 937 bp, Homo sapiens
ggcagagctcattgctatgcatttatagatcaaagaggagcagatattttatgttaattggataacacctagttctatcaggtcagtaacctggggtccctggggctcccccatgggtcataccagatagatagattttttaaaaatttgttggaattaaagtagaatcaaagcctagtgctagcccagaataagttattcaataaatgcttgttgagtgaataatcatccgaaatgattataatactgcctaccattcgttgaaagcttcagtatgtgggagaatctgtcctgggcactttatatacacccataatctgtttggatttcttggtaggaagactacatggctgcatacatggtctttcattacctccattttatagatggagaaaatggaaatttaaagaggttaagcagtttgccgaaggtcacagagctactaatcggtgaggtcaaggttcagacccaggtctctcagactttaaaactggtgcacttaaccattagactctactttttgcgtattgagatgtggaagcatctcaattaattgcttcagtcttggagttctttggcggktatcaaaaactgcctatttccatattgcctccagatattgkaattaagaatttccaaggccaggcmcagtggcttatatcygtaatcccaacattttgggaaaccaaagttggaagawcccttgagcccmgaagtttgagaccagcctgggcaacatagggaggcttcgtctcttcaaaaaatacaaaaattagccaggtgtggtggcgcatgcatgtgtagtcccagcttctctggaggctgaggcaggaggattgcttaagcccaggaatttgaggctccagtgagctgtgattgtgcccctgccctccagcctgggcaacagagtgagatcctgtctccaaaaaaaaaaaaa

SEQ ID NO: 18 - DNA, 842 bp, Homo sapiens
gcacgaggttttaaccatgagaaaccgcccccatgatccaatcacctcccaccaggccccatctccaacattggggattacagttcaccatgagatttgggcaggtaacacaaatctaaaccatatcaccattcaagtttttaatcttcataaatgccaaggttttaaaagactgccgggtagtcctaaattgctccactgagcagataagcaattactatgagtagcgtcattttaaatacatgcaaaactattggtatagtgacaataaagcattaactaagattaccataactggagattaggaaaatttcatctgagttgcattgttctcttttcacaatgtataaattgcttaaattgggtgatagtttagtttaactttattactaagcattaacctcaaggattgaagctcagattgtggaatttcacctgctatccagtgagcagagagggtattctttggacatagggaccttttaagtagccttaaaactatagtaatcagggtgatgcatttcctcaaaggcttgcccagtttatgtcatccaagcatgccactctctacacagcacacttaaaactttttagaacagaaattgccgatgtgttttagctcacttgccagtgcttgttgattgtcagtaattacatgaatctctcttgaaaacagttctgggagcggggagggatagcatttggagatatacctaatgttaaatgacgagttactgggtgcagcacaccaacatggcacatgtatacatatgtaactaacctgcacgttgtgcacgtgtaccctaaaacttaaagtataatttaaaaaaaaaaaaaaaaaa

SEQ ID NO: 19 - DNA, 184 bp, Homo sapiens
aattcggcacgagatattattttattatcaaatgtacagtatattgaccttaaaaatacagtaaagcagtcatggaaataacaggtcgtgtattattcatgggcacaaactgactcatggctggggaagaagcagccaccttagaccagatggacaagccagatactgcagagaagcggcacga

SEQ ID NO: 20 - DNA, 468 bp, Homo sapiens
ttttgaaataaaggtttttactctgtcctaaagatgaagtaaatccacattcttatcgaattaaatttgcatccttaaaggactactgactctgggatagataaaagacataccaattaggaggactgagaagtccataccacagatggttgaggagttagactaaattggcagtgaattaagtgcataaaagtgtcaaaggcaggcctaaaataactcgaattctccaaggcaattcatttttttgttactacaaccatctgtcaatctgaaatcaatcctacgaatccttacgtgcaaactaaaaactggagaattgcagacgtttgcaacatttaatgtgaaattagtttcatactgtttcctgaagatgctgatggtgtaggtcaaatgaaacatcatagaagaggcagtatatgtatatcctttagtatatcttttaccttcagaaactttttttctcgtgcc

SEQ ID NO: 21 - DNA, 995 bp, Homo sapiens
gctcagaacaccaactgctgaggctgccttgggaagaggatgatcctaaacaaagctctgctgctgggggccctcgctctgaccaccgtgatgagcccctgtggaggtgaagacattgtggctgaccatgttgcctcttgtggtgtaaacttgtaccagttttacggtccctctggccagttcacccatgaatttgatggagatgagcagttctacgtggacctggagaagaaggagactgcctggcggtggcctgagttcagcaaatttggaggttttgacccgcagggtgcactgagaaacatggctgtggcaaaacacaacttgaacatcatgattaaacgctacaactctaccgctgctaccaatgaggttcctgaggtcacagtgttttccaagtctcccgtgacactgggtcagcccaacaccctcatctgtcttgtggacaacatctttcctcctgcggtcaacatcacatggctgagcaatgggcacgcagtcacagaaggtgtttctgagaccagcttcctctccaagagtgatcattccttcttcaagatcagttacctcaccttcctcccttctgctgatgagatttatgactgcaaggtggagcactggggcctggaccagcctcttctgaaacactggggtgcatcgccatctacaggaacagaagaatggacttgctaaatgacctagcactattctctggcccgatttatcatatcccttttctcctccaaatgtttctcctctcaccttttctctgggacttaagctgctatatcccctcagagctcacaaatgcctttacattctttccctgacctcctgattttttttttcttttctcaaatgttacctacaaagacatgcctggggtaagccacccggctccctaattcctcagtaacctccatctaaaatctccaaggaagcaataaattccttttatgagaaaaaaaaaaaaaaaaaaaaaaaaaaaaaaaaaa

SEQ ID NO: 22 - DNA, 492 bp, Homo sapiens
  SITE (465): n equals a,t,g, or c
  SITE (472): n equals a,t,g, or c
  SITE (487): n equals a,t,g, or c
tcgacccacgcgtccggatcgacattgtggccatcattccttattttatcactctgggtaccgagctggccgaacgacagggcaatggacagcaggccatgtctctggccatcctgagggtcatccgcctggtaaggtcttccgcatcttcaagctgtcgcgccactccaaggggctgcagatcctcgggcaaacrctgaaggcatccatgcgggagttggggttgctcatcttctttctcttcattggagtcatcctcttctccagtgcagtctactttgctgaggtggatgagccagagtcccatttctctagcattcctgatggcttctggtgggcagtggtcaccatgacaactgttaggctatggggacatgtgcccgaccaccccaggggggtaaggattgtgggcactctgtgtgccattggcaggggtcctcaccattgccctccttgtggcctgtnattgttntccaactttcaattnatttt

SEQ ID NO: 23 - DNA, 496 bp, Homo sapiens
  SITE (235): n equals a,t,g, or c
  SITE (486): n equals a,t,g, or c
gggctcctgtaaggcagcaaggtagcgtggccggcgcccgagctggggttgtgtccctgctgggctgccgttccagctggactgccgccatggaactcagcgccgaatacctccgcgagaagctgcagcgggacctggaggcggagcatgtggtgagttgagccgccggacaaggggaaaagagctcggggggcgggttcggcaccattcatattcttccgctcggtaggaggtngaggacacgaccctcaaccgttgctcctgtagcttccgagtcctggtggtgtcggccaagttcgaggggaaaccgctgcttcagagacacaggctggtgaacgcgtgcctagcagaagagctcccgcacatccatgcctttgaacagaaaaccctgaccccagaccagtgggcactgagcgacagaaatgagggatgggatctgcacagccattaaatataaatctgggaaaaaaaaaaaaaaaaaattcnggggggggcc

SEQ ID NO: 24 - DNA, 401 bp, Homo sapiens
tgcaggaattcggcacgagatgaattactttgattactttggtctcaattatttgtcaccccagttaaacatgaaaggttgcagtgcttcctgttcccttactggaagttagctttttcttttctctttcttcctttctttctctcactctttctttctctttctctttctctctctctctctctctcactcactcactcacagatttgctaatgccacagaaagggctcttttaacttaagataagtgaaaagtactaaaaaagattcaggtaattatcattcagcactttattgtaattcagaataaaatttatgatggcatatttgccctgcaaatgtcttaatgaagttgttctcaataaaaagctccttattgatttgaaaaaaaaaaaaaaaaaa

SEQ ID NO: 25 - DNA, 1759 bp, Homo sapiens
gggtcgacccacgcgtccgagatattccaatttgcatcagtctttctgtggctcaaataatgatgattatggaatgaattttaatgtccctacttgtgaataattagctttctcaaatgtaggctttttacaaattttaaattttaaaatattagtttaaatgtgtgttatactgataaaatttcatctttcaaattatagtctattattttaaagggatttttcagtatgatatgggccattttgttcatctatcgcaaagtaaaaatgtaaaatccttacagagaattgtttcacaaaacttatatttcatgtcaattgtatttattttaataatagctcacaatgcctttagtaagtaataaagtctcttattagaatcttgtattttttaattgagctaatcaaaataattcagccaagtctatttgaaatagaaaactgtctatttaatatagtaaaatcaatgctcccttaatgttgttacaaagatatggtaactgtaatatgggtaaaagtttattcaagaaaagagtacttggtagaagattctttaacaaattgaggagattgattcataattcacatgtcaattttttatagtaatatgtacttctaatttattatttatacttaaattgtgacctgaaagatgagttggagataattagtcaaagggcacatggagtatggaagggggcatgttgattaaccatacatagaaataaatattctcttagttatccttgaaatcatatttatactattaatttgctcagtgcacttttttcaaatacagaaaaaagattctccattatagttacaaattttaggttggtgaatccaagtgaatgaaatatcagcataactatgtgggcaaaatagatagaattaaatgcatgaattttcctcagacttattttatctgcctctgtaatatttaactttagtacccaggcttgttcactacttctgctttacaggctttatttaaatctgaacaatcctacagggaaatcagaattaggaaaaaaatctggagaacaatatggttgaaatagaaacaagagaatgcacctaggttaattccctgaatcctacttgaacattgtataaatttctctttgcatataatacatatttgtgaatgagacatattcccaaaaaattcttatctctgtatgtgattggaaaagaaaagatcacatttgtatattcaacaatctttcacctatttcataagtcattttttcaccctgtatagtatgggaattattttttatgttaaatagaaactgaatgtactgggttgaatggtgtcctctccaaaattcatgtacttcctggagcctcagaatgtgaccttatttggaaatactgtggttgtggttgtaagtagctaagatgaggtcatactggagcagggcaggcccttaatccaatatgactggtgttccttataagagaagatagggcgggcatggtggtcacgcctgtaatcccagcactgtgggaggccaagccaggcaaatcgcttgaggctgaggagttcaagaccagcctggccaacatggcgaaaacccatctctactaaaaataaaattagccatgcgtggtgcttgtaatgtcagctacccaggagtctgaggcacaagaatcactcgaacctgggaggtggaggttgcgagatcacaccactgcactccagtgtgagcaacagaacgagactctgtctcaaaaaaaaaaaaaaaaaaaaaaa

SEQ ID NO: 26 - DNA, 1366 bp, Homo sapiens
ccacgcgtccgcggacgcgtggggtgaggctgagccgccgggccctgtggatgccactgacctccccaaagtccagattccccctccggcccacccggcccctgtgcaccagccaccgccgctgccacaccggcccccgcccccacccccctccagctacatgaccgggatgtccaccaccagctcctacatgtctggagagggctaccagagcctgcagtccatgatgaagaccgagggaccctcctacggtgccctgccccccgcctacggcccacctgcacacctgccctaccacccccatgtctatccgcccaacccgcccccgccacctgtgcctcctcccccagcctccttccccccacctgccatcccaccccctactcctggctaccccccacccccacccacctacaaccccaacttcccacccccacccccacgcctcccgcctacccacgcagtcccccctcatcctcctccagggttgggcctgccgccagccagctacccacctcctgccgtcccccctggaggacagcctcctgtgcccccgcccattcccccacccggcatgcctccagttggggggctggggcgggcagcctggatgagataacgtgagccttttttccctctttgtttttttaacaagattttctaatcgacttgcagagtagttgaagtgggtaagcagcagggtaccttgtataatgcacgacagttgcagtatgggaagaatggaccgggcccctgggataaaatcagagtggtcctcacacctagaggacggggacaaccagctttcagagtagcctcatcagtgcccttgcagtctgactgtgtacacttggttcagctaatgtctgagagtcctgcactgggttactttatactagtgaggacgttaaccagccatattggctcaataaatagcttcggtaaggagttaatttccttctagaaatcagtgcctatttttcctggaaactcaattttaaatagtccaattccatctgaagccaagctgttgtcattttcattcggtgacattctctcccatgacacccagaaggggcagaagaaccacatttttcatttatagatgtttgcatcctttgtattaaaattattttgaaggggttgcctcattggatggctttttttttttcctccagggagaaggggagaaatgtacttggaaattaatgtatgtttacatctctttgcaaattcctgtacatagagatatattttttaagtgtgaatgtaacaacatactgtgaattccatcttggttacaaatgagactccttcagtcagttatccaaataaaagcagttctgaaactaaaaaaaaaaaaaaa

SEQ ID NO: 27 - DNA, 1681 bp, Homo sapiens
cgcctgcaggtcgacactagtggatccaaagaattcggcacgagaaaatactattatgagatggacatttatgtgaagcatgaggggcaattctgatttgattggatattgtttttaaaggaactaaggtctttgtagctgcatgtcagctagtcatcagttacattttagagacaggatttttgtttatacttaaacttcagacaaattggcagcatataattgttcctttatacatgagataatatgatgatataactgatgtttaagaacattcttattgtaagacagtttctgttttgccacagcaacccaaaggacagttaagatatgtaccatatgacctttttgcatatataccaatgtgaatttacttttacattaatcatttcccccaaagagttcaccctatgttttgacagaacagttggcatttcaactgataaggtatttctagttttaaaataatttggtgtttgtattttgttttgaatatttttaaagactaattttaagaatgcactttctataaagtatatgcatcttagaaaaccaggaacaggggagaaagttttttaaatgatgattgaagatagattttattggagaaatgctttactgatgtgtattttagtgcattttaaaaacctaagtatctggtagtattccccttgtagtgagcatgagattaaagtttagaactttttaagacaattctttttttgtggttgtgtactcattattgcttgttcgtcttttgcaatttagataaatgatataacattaaactcaaggtggttgagttgcagtagggagtcggaagcaagccaagggaacatctttctctacaggggacttggcgattccaaacccccaaggttccaagaagaaactgaagacacctggaatctgtacttgctttgtgctattgagctgtgcttgttatacagaccttgttgcttgaccaacggatttagcatttaaaaacccaattatttttgagaaatcttgacctcttagcactttgtggacagttgagaatttgaggcattgttataatagattttccttatataaaactcaggcctttagcttagccctcagaagttacagactgcatgcataacttgttagttttcataactggacaatagatattttatgcaaagctatctgtagtgttagggagcagtttatgtactttttccgtttctcattgggggaaaatttccaggcaagcaaatacttttcttgttagtaaatactagaatttgtggatgtttcatgatggtttttaaagttaataaatgtaaggcccactaacagccacagagtctaaaaatacttacgaaatccacaaaggattaacaggctgctctgatgcttttggtagagtgagagagaatttggtaatctgttagagattatattgctgagaagctactagggaagactatttgtaaaatagtaaggactatatatatgtctaagcccctatggtagacttaaaaaatactaatttaaatgagttttaggttggttgatttgttggttggttggttttgaagtaacctgtttttcttcctgtcgtgtctttttgcagaatccagactccaaaatgatgcaaatcaacctgactggatttttgaatggaaaaaatgctcgagagtacttctagagc

SEQ ID NO: 28 - DNA, 1063 bp, Homo sapiens
ccacccataaggcctcatttaacttaattaccctttaacggccctatttacaaatacagtcatactttgaagtactgggggtgtggattccaacacatgagttttgaggggatgcaattcagcccatagcatgtggtaatgtagaatgtatgtacagtcaataaaggaaagaatataatatttttaattatatttagaaaaaatataactttatgtatcaaggaacatgataagcaaagtaaaaagaaaaataacaaactaggaaaacatatttccattgcacatcacggacagtgttacctgttctaatatacagtgtcccaaaacagggaagagcaaccacatagaaagatgtggttgagagaaatgaacatagttcggagaaaaagaaaagcatatgacttatagccatataaaaagatgcacaacttcattgattgtaagagaaatgcaaattaaatacaacgaataccatttctcaactattagatgggtaaatggttcaagtgtgacaatgtacttagttggagaagctgaagggcatttttatacattgttgatgtgattgcaaaatggttttacaaaacaccatatgcatttattctttgacaaaacaactccacttctagaaatttattccactggcaaaattacagaaaggtgtgtggacatggctttcattggatatctactggagtagcataagactagaaccaactccaaattcccagagtaagaagctagttgaataaactatgatactccacacaatatggttctatgcagttgttaaaggaatgaggaatatctttatgatatattgcccactggaataaagcaatgtagagtaaagtgtatacagtatttattatttactggagaaaggtagggtgcacatatatacaagggaagaataagctgtaaaataaaaatcagctactacataaaaagggagagagaaagtagggtaaagagaataggcacagaagtgaatttgccttgtaaacttgacttctgagctgcataaatattttacgtaattacaaaacaaaaaaaaaaaaaa

SEQ ID NO: 29 - DNA, 3025 bp, Homo sapiens
  SITE (3011): n equals a,t,g, or c
  SITE (3014): n equals a,t,g, or c
  SITE (3015): n equals a,t,g, or c
gaccgggaggcgctgccgcttctgggcagacggttccgggagccgcacggtcccctctccttccccatcctctcccctcccctctccgggttcccccacccacaggagccttgggccgaccactcccccgatggcctcagccacggaggaccccgttctggagcgttatttcaaaggccacaaagctgcgatcacctccttggacctcagccccaacggcaagcaacttgctactgcttcttgggatacctttctcatgctatggaatttcaagccacatgctagagcttacagatatgtgggtcacaaggatgttgtaaccagcgtgcagttttctccacatggaaacttattggcgtctgcctcacgagacagaaccgtgagactctggattcctgataagagaggaaaattctcagaatttaaagctcatacagctccagttcgaagtgtagacttttcagctgatggccagtttctagctacagcttctgaagacaaatccataaaagtatggagcatgtatcgccagcgcttcctgtattccttgtatcgacatacacactgggtacgctgtgccaaattttcacccgatggaagactaattgtgtcatgtagtgaggataaaactattaaaatttgggataccacaaataagcaatgtgttaataacttctcagattccgttggatttgcaaattttgtggactttaaccctagtggtacatgcatagcttcagcaggttctgatcaaactgtgaaagtctgggatgtaagagtgaacaaattactacagcattaccaagttcacagcggtggagttaattgcatatcattccatccttcgggtaactatctcatcacagcttcttcagatggtacccttaagattctggacctcttagaaggaaggctcatctatacacttcaaggacatacgggacctgtctttactgtttcattttcaaaaggtggagagctatttgcatcaggaggtgcagacacacaggtcttattatggaggactaactttgatgaattgcattgtaaaggtcttaccaaaagaaatctcaaaagattacattttgattcaccaccacatcttcttgatatctacccaagaacaccacatccccatgaggaaaaagttgagactgtagaaattaatccaaagcttgaggtaatcgatttgcagatctctactccccctgttatggatatcctttcttttgattctaccacaacaacagaaaccagtggtaggactctgccagacaagggtgaagaggcctgtggatatttcttgaacccttccttaatgtcaccagaatgtttgccaacaaccacgaaaaagaaaacagaagacatgagtgacctcccctgtgaaagtcaaaggagcatacctctcgctgtgactgatgctttagagcatattatggaacaactcaatgttttgacacagactgtttcaatcttggagcagcgactgactttgacagaggataagctgaaagactgccttgaaaatcagcaaaagcttttcagtgctgtccaacagaaaagctgaataaaaaattcattttcatttgttgggcagaggcccaataaatgaacaaatgtacatacactcaggaaggtagtacaagatactccatacaacacaaccatgtgctatttatcatggcatttcttaaaagggtgagcaacagaacaaaaggcagaaaaggcatacctaaggactaatttaaacacatatcaatgtgaaggactaatttaaattactatcatttatgattgcagtaataaagtgataagcattcaagcaactctgtattttccccatattattttaaatgtccattttcatttataggccaaatcctgccaggaaagtaaccagatctctggatttcactgttaagtcatttcagattgaccatattcagacagtcatggggtgaaataattcacttacctccaaaatagcatcctatatgccaataatgagttattgatctgactagttgtatgtctttctgttcaaaatagaaattatcctttcttactaatgccttgaaagaatgaacaaataaaaattcccagaccacagaatttccacagcaagaatacacttattttaattaacaatagcacagatatagcatagggcagtgggttttttagttaatttatggcgtactttgtttatccattggccaacctgaaggaaatgaaactcacctatctttctatcacagatgaatgtgctagatgaatgatttgggttgtatctgatcatggttcacaaaaattatgttagtgtgttttcagtatgctaaaaagtcagagtgatacaaaagtgatatttaaaaatatacacacatgtatgtacacatgcttcagaaatattgttgcttagggtgatttgggcagctaaatagtaagtactttttaaaatttttgcatcatcatcttcctatttaatgaattgtgatttaaaacaaaatgaaaataagccaggtattctaaaagatcctggatacaaattaagaattttgctttattttaaaccaaattgagattaaattgaagaaaagcaagcaaattaatttcagcttgattatcaacctgtatcaagaacaaaaatgggaggaggtgtccacatttatggtgtgtataggtaacatggggaaaatgctattctgtgttttggaaaagaagaaatagtgccgtcctatttatttctatatttagaaatttttctcaaagaaatttcaattgtatctatgagatgggtttctaagtatcttattgtgtgttataagtgccttttaatatcatactaagtgtgagcttctggacattttcaagagcttacaaaaactaagtggcattgtatttttataaccccattgagaagactaagtaagaaatgaaatgtcctatcaattttattttgtcatgcttcaaacaataaagacatttctgctttaaaaraaaaaaaaaaaaanggnnggccccctta

SEQ ID NO: 30 - DNA, 437 bp, Homo sapiens
aaaaaagttataaaaaaagataggttcaaatcctagctagggaaaaaaagatagaagtcactagactggcatattctacaaaagcataattgctagactttcttatgcgtcctgcctttgtaactgctgttgcctctgcctgatctcctttccacctactctttcccacaaactaattcatgtgcttcaaaactactatttttttcgtatcatttctaatatggtgcttgatgcctagaacatgtagtcatctatgtaatgcccattcccaacaaacttccaagcttttgttaatgctggaataaattaatataaacctaaagtttatgaattagtataaacctaaatgtctgaaaataatagacatgtagtattgtattcttacctcaaaatatgttgaatcttgccaacattaaatcaacactggtgttcttaaa

SEQ ID NO: 31 - DNA, 401 bp, Homo sapiens
cagatggcggaagcggaatttaaggaccatagtacagctatggatactgaaccaaacccgggaacatcttctgtgtcaacaacaaccagcagtaccaccaccaccaccatcammacttcctctctcgaatgcagcagccacagatctctgtctacagtggttcagaccgacatgctgtacaggtaattcaacaggcattgcatcggccccccagctcagctgctcagtaccttcagcaaatgtatgcagcccaacaacagcacttgatgctgcatamtgcagctcttcagcagcagcatttaagcagctcccagcttgggagccttgctgctgttcaggcaagtttgtccagtggaagaccatctacatctcccacagggaagtgtcacacagcagtcaag

SEQ ID NO: 32 - DNA, 656 bp, Homo sapiens
caaaaaggacaagggaatttacagagcgatggtttctgacgatcgaggggaggacgacaccatattggacctcacgggtgacgccctggatgccatcttcaccgagttgggcaggattggtgccctctctgcaactccactgaaaatccaggggaccgaggaagggatccggatcttcagcaaggtcaagtactacaacgtgggagtacatgaaaaccacctggttccacaaagacaaacgtctggagagtggtgatcggataaggacgggcaccaccctggatgagatctggcttcacatcctggaccccaaagactcagacaagggcaaatacactctggaaatagctgcagggaaggaagtccggcagctctcaacagatctctcagggcaagcttttgaggatgcaatggctgaacaccagagactgaaaaccttggccatcatcgagaagaatcgtgccaaagtggtgagaggtctgccggatgtggccactatcatggaagataagaccctgtgcttgacttgcatcgtctcaggagaccccacccctgaaatctcttggctgaagaatgaccagcctgtcaccttccttgaccgataccgcatggaagtgagggggacagaggtcaccatcaccattgagaaggtcaac

SEQ ID NO: 33 - DNA, 444 bp, Homo sapiens
  SITE (422): n equals a,t,g, or c
  SITE (425): n equals a,t,g, or c
  SITE (430): n equals a,t,g, or c
ttttcctgaaggctcctgatgagaggaggcaggagatggcgaatattttggctcagaagcaactgcgttccatcattttaacacatgtcatccgagcccagcgggccatcaacaatgagatggcgcaccagctgtatgttctacaagtgctcacctttaacctcctggaagacaggatgatgaccaaaatggacccccaggaccaggctcagagggwcatcatatttgaacttcgaagaattgcttttgatgctgagtctgaacctaacaacagcagtggcagcatggagaaacgcaagtccatgtacacgcgagattataagaagcttggggttcattgtaacttggggttttactcctgtaacaactgaaattaccagtccttgataccagagaatattggatggaatttaaaccatggnggnggtgncttagtaaaatttt

SEQ ID NO: 34 - DNA, 1021 bp, Homo sapiens
atacagcaactatatttatgtttatctgggcttcatattaaagaacaaaaatgattttaccttaagtgggatataaaataaaggaccttaggaagatggataatatataaacaccaactaggacataatgggaaagtcttgttttttccaggtctagctatttttgatgccagcgggttttaattatgaaaggaatgctttttccatatatttcccctttactctttcaacactaattaatttgtgagcatgtcaattccatatttagttaattgaaaagaatatcaagaggattgagtacttctaaaattaaatttttaatgaaagtcatttaaattaaagtagattgtagattaagtgtttaaaaattaagtcaagttttattagaaagggcaaaaccactgggattttagaagatggctcaaattagagcaagaataatttttaaagtgtgtaactttcattttatattttgtgacgacaactttgctaagaaaaaattgtactaacaattatttaattgcgtgcggttaattcataaatggaaatgcaactaattaatatgtaaatacaaatgtcacattcccactgtgcacataaaaccacacatgtaatatttagatatattgattatataatgcattttatttagataataggaattctatgcaatagaaaaaggattttttatacttacagaaattttctggatgacaaaagtataaataggctgggcgtggtggctcatgcctgtaatcccagctctttgggtggccgaggtgggtggatcacttgaggtcaggagttcaacactagcctggccaacgtggtgaaaccccatctctactaaaaatacaaaaattagcggggcgtgttggcaaacgcttataatcccagctgctgtggaagctgaggtaggagagtcgcttgaacctgggaggcagaggttgcagtgagcagaatcgcaccaccgcactccagcctgggcaacagaatgagactacatctcaaaaaaaaaaac

SEQ ID NO: 35 - DNA, 524 bp, Homo sapiens
cggacgcgtgggaagtatattattggtgccttttatttaaatcaggcagtgtagtaattgctcaagaatacagtcatgaaaagacttacttcccatgtctttgtggagcctatggtagggtagttaagtagataaaaacatcttaggatgtggagatgttattgcaaggaattgtttagtaaatagtttcaaatatggctgaaaataagagattaaaattaaagttaattgagttcaataactcaaatagtttattgaggcattactatgggttttgaggcagttgttttagggagttatggcaacagaagctatattagtacatcagtaagaggaaagaaggacatcaatatttaatgtacagtcccctcyktatatgcaggggattggttacaaatccatctataccagaatccatgcatactcaagtcctctggaatccacatataggaaaactcagtcctgactatacatgggttcctcatccttcaaatactgtttttaatccacatttggttggtggc

SEQ ID NO: 36 - DNA, 439 bp, Homo sapiens
  SITE (48): n equals a,t,g, or c
  SITE (292): n equals a,t,g, or c
  SITE (429): n equals a,t,g, or c
tgtcttatgctagagttggtagaagaatacagactgacagtgaaaganagctactgcatttttgaatctggaacctgaccgatgctatcaagtgtgggtgatggctgtgaacttcactggatgtagcctgcccagtgaaagggccatctttaggacaggtaaggagatggatgctaagggtgcattagaagacaacgctcagttcttcacagactcttgagatcagccagtaagtgtttattaagcacctattgtgtgttgagtgttgtgcaaagtgctggttatacaacgntgacttaagcctggggtcctgttctcargaagctcatgctcaggtggggagatggaaaaacagaggatcatagaaaatgtgtggtaagggccatatccagatatacacaggttattatgagaacactccagaggggncacccaagtt

SEQ ID NO: 37 - DNA, 1292 bp, Homo sapiens
ggcacgagattgattgtaagatggatctctatttcagtgatgttgaagtataaaaagtggttgaaatacggtaaatatagattctcggtgtcccaggacctttagagaacattgttttctgtagagtaatagcacatgctgggttcatgttagcccctttcaactttatgtatcattaattaagtgttgatgttctagatatttaatggacactaacatcaagatgaccttgtggtatgtgtccagagcattctagtgaagcctagtgatttagcttcagattatgagaatttaacagtctaatgtagggttagaaaatattcatgaaactggaataatcagatataacatggcctttcttttaaaatattcccaagatatttttatgtcttctgattttaaagtcttctgaggatggactataacaattcttatcagtaaaaactatttttgggtattagttctatataaagacctgcagggagttgatatgaataaaatgtgtcataaactcaaacagacttttctggtgattaaagattctcatctaggaaatttgtttgctacttttttttttttttttttttttgctcagttcatagttgaaacctgtttatgtttttgttatgtgatcagtagaggtaacaacttatttatgattatctgggacagaaaacaaatctaattgagtcagggtagccaacatctcctttacaaatgagttatatgaaatataggacctgccgacggagccagtaggagcccagatattcatttccttgccactctgccttgtgcagggtcaattgaagatatagcaggagcaaggacaaagagagggtagagagtgaggggaatttggattatctggggccaaaatgatgcagtcgtctgggcttgtggcctcgtattatgggccaggaagaattgaggaacagtgccaggcagtaattagacactgttcgttttagttaactttctagaccatttggcaatacagagtttaactctgactcctgccatggctgtgtatcctgtgcctttccagaggataaattcatacaaataagatagagagatgacaagtacgtttgtggttattcacatataacagtatgactgatgcatctattattaagctactttcatgttaaaaaaatttattactatgacatttcagtttggcacttttaaatctcatctctgtcccttttcctgtgttaaatttcagtgactcagatatcccacatcagaactatgtgagacacgagatagaaaaaaaaaaaaaaaaa

SEQ ID NO: 38 - DNA, 611 bp, Homo sapiens
ccacgcgtccgcccacgcgtccgcccacgcgtccgcccacgcgtccgctgctaacaagcctttggtaagtcacttcagatacttttcctcctttttacaaagagagggctggcttagttatttgccaaagccccttccaggcctgaattccacaagtacgatttactgtagtgtcttatcactctttcatgtcacaatagcgtggagcattagagaaaagcctagacttttagttgatagccagttgaaatatcattgatagaattttagttttaggaaaaattggtttgatttctagctttattactattaggtatgtgagcttgggcaaatcgcttaatctttgagtctagttttctctcaaaatgagaacattaggctaaatgatttccgagtttccagctagtcctagagttctatatttctacatagttgaattattttatcatgctgttgctggggaatatgactaacccttttgaagctactaattttatgtcgagctttaaagtccataattgttatcttcagaaaatattatttgacctacagtatgtccaaatcaatttaataaaatcgctttataacaggaaaaaaaaaaaaaaaaaaaa

SEQ ID NO: 39 - DNA, 131 bp, Homo sapiens
ggcacgaggtccatgatgcacacactcacacatctgaatgtgtattcggggggagcgtccatgatgcacacactcacacatctgaatgtgtattcggggggagcgtccatgatgcacacactcacacatct

SEQ ID NO: 40 - DNA, 1869 bp, Homo sapiens
  SITE (1853): n equals a,t,g, or c
  SITE (1854): n equals a,t,g, or c
gcgctctgggacactcagtctgatggggcaggctggtcagaagacatagagccatggtgtgtttggaactttcacagagggaagcctggggctcgggaagcccggaaaagatgccggcgcagcctgagggcttgtacaggtgccactgtgccgaaggtggctacgagggaggcaggtgtatgggtgagggtgagtgcagtgtggctggaggcttagggaaaggtgagtaggacggcgagagacccacggggaatgagggctggacctcagcctgagtgagtgtgtttggtggggtgagcagtgatgtcagtccctcctgggagctgctgtgatttggggctttctactttattcactcaacaaacgtttctcagaatggagggtgctcggggccgtagggcacagatactgatgtggccctttagggtcacagggtccagggttcaagtcccagctccaccactatccagctgtgcaacttttgacagtttgctgtacctctctgagtctcagatacttcatctttgaaatgggcagaagagcacctgccccgtggcttcctgtgaggatgtatagaaawgctggtccagctcctggaatggcatgtccctcccccaccctaaagtgcacgtttagtggaaggaaaggggggatggggaaggatgggggatggggacagaagtgagcatctgaacctaacaggagggctggtccctgcctggtggggcagcaaggggtcctgccacagcccagcgaggaggtgggcatcccagagccgcagcagtggcagcgctgcctccatggaggtcccacagcaggactcgccagcctttgtcctccccaccctgggtgcccgactttcccatggaagctgctgcatcttcccatgcctgcccaccacagcaggtgggctgggacgtctctctgagctgcagatcccctggttgggagagtaggggacggacatctggcctgagacccccccacacacaccagggcaggttcctggctccctgccagagcctagctgcctgcctagaggctcagagtccccaagaactcaaggtgacacagtggtggcagtgtgtgacagaggaaggagccaaggtgggatttgagaacctggggcagggcagggcagacctggggcacaggctgcgggacccggacagagcagggtcggactacaatgtggtctccacattcatgcatccatcatgcagctctcactggaccctggcattccagggccacgattktctgccagactagcacggcagcggytctgcyttcctmaccctactgtgctgccagtggttcctgtgtctcttctctctcggcccctgcatctgcagagctgaggtgctgatcctcctctcctggcctctgtgtgaggctcaaatgacaccagcccatgaagggctcagcacatgcctgccacatagtaggagtctgcaggatgatggctgttcacccggagggccagccttcctttgactgggttcctgggaactctgggaagtgctttgcaaaatgttagttaaaaaaaaagtttgggaggccaggcgcagtggcttatgcctctaatcccagaactttgggaggccgaggcgggcagatcatgaggtcagcagtttgagaccagcctggccaacatggtgaaaccctgtctctactaaaaatataaaaattagctgggcatgatggtgggtgcctgtaatcccagctactcaggaagctgaggcgggagaatcgcttgaaaccggaaggcagaggttgcagtgagccaagatcgcaccactgcactccagcctgggcaataagagcaagactttgtctcaaagaaaaaaaannaaaaagggcggccgc

SEQ ID NO: 41 - DNA, 936 bp, Homo sapiens
gttggatggacaggaacacagggagaggccggagggggaaacaggggatttgggcaagagaggtaatgggtggaagggaccggacacctgggtcccagagggcatcaggggaggtggagtctggggaaccgaatgcttgggtcctgggcgggtagctgtttgaaaggccagtacagtacagtacagatagtagtcttgggacctgggaggagggtgtcctgaggtgtgagctttgacctgtctgtcctagcagaagatgtaaaaggtgaccgggagcttcgaccagggcctcgagatgagccacggtccaatgggcgacgagaggaaaagacagagaagccccggttcatgttcaatatcgccgatggtggcttcacaggttggggagactctcgctgctttctgctcctcaaggggatctgctcatcctcatggggtttctcgttttgcctgaggcttcctgctacctttaattccaagtaacttccaatgaagtatgttgcatgctgactccgatccttgctctaaatctttcttaagtatccctcttaactccaaagctggccctaatcccacctttattcttaattctaacgaacctggttagaactgagtttgttccaaacctaacctttacccattcctcttcaggagcccttagttccctttcattattcagtttctccatctctacctgtctgttggactgagtgcagtctgcaaaaccctgttacctcttctgtctgctgccttctttgcagagcttcacacactgtggcagaatgaggaacgggcagctatttcctcggggaaactcaatgagatctggcacagaagacatgactattggcttctggctgggattgtcctgtatcctttgatacacatgcaagaaggaaaaggttctctcaagctggcaaaaaaaaaaaaaaaaaa

SEQ ID NO: 42 - DNA, 663 bp, Homo sapiens
  SITE (55): n equals a,t,g, or c
  SITE (555): n equals a,t,g, or c
  SITE (561): n equals a,t,g, or c
  SITE (587): n equals a,t,g, or c
  SITE (656): n equals a,t,g, or c
  SITE (658): n equals a,t,g, or c
ggcacgagcagaaacctcctcaacgcactcagaatctcctgtggttgtggacctnccggacacccccttcatctttaagcacaccgtcaacaattccacagctgtratttcctggacctacgccttgggcaagcarccggtcagtttctaccagcycctgttacaggaggtggccaagacacaggagaatgagttgcccgaggcaaagaatcgtccatggatcttcaacaagattttgggcactactgtcaagctgatggagctaaagcctwacacgtgttactgcctcagtgtccgtgcagccaacacagctggggtggggaagtggtgcaagccctacaaatttgcaaccctggccactgacttcagcagctttcctgagaactaccccatccagatcaccgtgcggcgcaaggaaccccggcaaaagatcgtgtcatcgggcccggaggagatgccggaggctggaggatctggaatacctatttcctggtaagggggagggccccaggacacccctaactactttcagcttcaacccaggcccttaaaaancagaanccttgagacctaacattccaaccagnaaccttgcgggccccggggtctggcaaaatgggattgggcacccaaaccctgggcttggggcccaaggntncataa

SEQ ID NO: 43 - DNA, 415 bp, Homo sapiens
  SITE (390): n equals a,t,g, or c
  SITE (396): n equals a,t,g, or c
  SITE (403): n equals a,t,g, or c
ttcattttacaaaggaactcactgccaggttctattgtaggaccttctgggtatattaatgcatgcttatgctcatagctggttatcctctgtttgccacagtccccagtcatcctctgaccttctttctgctctctgccctggagcttccattccattttggtcattgagaggcactagcaggaaagcaaaggacaggaagagacagaggctggggtatagacttttaccctcgcattgcattcccctcttgggttctggctttggctgctttctatgtcagccctagctcctctgctgcagctccagctcwcaccaaggtccagtaacactactgctcttctcctcctaaacttcaaggkttaatggtttcccatggktacaaacccngggggngcagagnctctgttggggt

SEQ ID NO: 44 - DNA, 1933 bp, Homo sapiens
ctgcaggattcggcacgagctcgtgccgaattcggcacgagcgactttgcagatttctcttcccccaggcctccctcctccacctctccgccccctccgggcttggctctcccaggaggctacgactggagccactggtcccgcaggatccccgcgtcctcggtcgccgcgtccacgtccctctcgcgtccccgcccggcgccacgccgcctcctctgggttcggcctccgcgcggtgcagcgcagtctcaggccgcgggacaagcccgacttaaatctctgcaatggctaacgaagcttatccttgtccgtgtgacattggccacagacttgagtatggagggctaggccgtgaagttcaagtcgagcacatcaaggcttatgtcaccaaatcccccgttgatgcaggcaaagctgtgattgtcattcaagatatatttggctggcagttgcccaataccagatatatagctgacatgatctcaggaaatggatacacaaccattgttccagacttctttgtagggcaagagccttgggacccctctggcgactggtctatcttccctgagtggctgaaaacaagaaatgcccagaagatcgatagagagatcagtgctatcttgaagtatctgaaacaacagtgtcatgcccagaaaattggcatcgtgggattctgctggggtggaactgctgtccatcatttgatgatgaaatactcagaattcagggcaggggtgtccgtctatggcattgtcaaggattctgaagacatttacaatttaaagaaccccactttgttcatttttgctgaaaatgatgttgtgattccactcaaggacgtatctttgctgactcagaagctgaaagaacactgcaaagctgaatatcaaattaaaacattttctgggcagactcatgggttcgtgcatcggaagagagaagattgctcacctgcagacaagccctacattgacgaggccagaaggaatttaattgagtggctgaacaagtacatgtagcaagaatcaagggcaagccttcctagaatagctttcatcccaaaatttgcttggaaatagttagatcatttgatttaattttcacttttataaaataagtgtaggaaccctaaaattgattatttcatttgaaacacaaattcagtaggacgtaatgcatgaaataatttaatttttgacatgtacatcgaatcataatttaaaaacaaggtctgaccaggtgtagtgcctcatgcctgtaattccagcactttgggaggccaaagtgggtggatcacctgaggtcaggagtttgagaccagcctggccaacatggtgagaccccatctctacaaaaaatacaaaaattagcctggtgtggtggtgcacgcctgtagtcccagctacttgggaggctgaggcacaagaatcaatagaacccaggaggtggagactgcagtgagccaagattgtgccactactgtactctagcctgggcagcagagtgagaccctgtctcaaaaataaataagtaaataaataaataaataaaataaaaccaggtcagtacctggagaatttgaatgatagagaatgatagagtaataccctaattattagttaaaacctacaggccgggtgcggtggctcacgcctgtaatcccagcactttgggaggccgaggtgggtggatcacttgaggtcaggagttcaagaccagcctggccaacatggtgaaaccccatctctactaaaaatataaaaatcagccgggcatggtggcatgtgcctgtaatcccagctactcaggagtctgaggaggagaatcacttgaacctggaggcagaggttgcagtgagtcgaggttgcgctactgcactccagcctggacaacagagggagactctgtctcaaaaaaaaaaaaaaaaaaa

SEQ ID NO: 45 - DNA, 477 bp, Homo sapiens
  SITE (404): n equals a,t,g, or c
  SITE (427): n equals a,t,g, or c
  SITE (446): n equals a,t,g, or c
  SITE (458): n equals a,t,g, or c
ggattttyttgtttttgttttgwttttggktggttggttggttttgatctttggggaaaaaaaaactccccccatgaatggagaaaaccttgkcagatattacttccctcctmagatgacctgacttccctgaagctcagttaacctgacttccctgaaacttagttttgagttcatgattattaatgattttgatgttgttattattttggcagtggttaggtagatcgagaaggatgcttaaattaagaactaaccaaaaggctgggcatggtggcttacacttgtaatcccacactttgggaggctgaggcaggaggattgcttgacccatgaattcaaaagcaacctgggcaatagagtgagaccctgtctctacaaaaaatttttaaaaaattatccanccttaatggcatgcacctgaaantttcagttaccttgggaancttaaggtgggnaaaaatgctttgaacccgg

SEQ ID NO: 46 - DNA, 1071 bp, Homo sapiens
ctttttcctgtgtccctgattattgtttaatagtgtttgtatactgacaagatacataatatccaccttctgcacccacagtgtccgcctttatgcttggacaagagcatgcagggtaggacatttctgagccttgcttttttccctggaagttttttgtttgtttgtttgttttttaagagacagggtctcttgctgtctcactcaggctagagtgcagtggtgtgttcatagctcactgcagcctcaaactcctgagttcaagccatcctcttgcctcagcctcccgagtagctaggactacaagcatgcaccactatgcctggctaggttttttttttttttgttttttttttttggagaaatggaggtgtctcaccatgttgcctgggctggtcctcaagcaatcctcctgcctcggcctccgattcactggtattaagttgtgagtcaccacgcccagctctacctttcagctcttcttacacatggctccactggagaggtgtgaggccacccctgtctttcccctagaagtgactgctttttctctttttctttttttaaatttgattttatgtttctttgtttgttttgggggattttgtaactgatttaaaaatttttttcctttatgactgctttttcttagactccttagggattcttcattctttttttaattgaaaaattttaaaaattttaaataattttttaaaattaataaatagcattcagctcctttttacttatgcaactcatacttaacatttagtaatttttctaggaaaagtcttagtgttgttttttttttttctgaatcttttttcttaatccttctagagcatgctgtgtaatttctaattgattgcagattcagctcccccctcccccattattttggaaaaatttatcttctgttaactttagttttgaattggtatctggggtttcttttttttttttttagctctgatacacattttatatttttaaatattccgtttttatctcatgtttgagctgtttttattaaaattcaagtttttattaaaaaaaaaaaaaaaaaaa

SEQ ID NO: 47 - DNA, 382 bp, Homo sapiens
  SITE (330): n equals a,t,g, or c
  SITE (376): n equals a,t,g, or c
  SITE (382): n equals a,t,g, or c
gatttacagatgaggaaatagacacagaagttgttactttctcaaggtcccaccacgaatgccaggtccaggtttgaagccaggcagtccgaagattgtttgctttcagcctctcctatgcaccctctctcaacttctgccattcccttggcttcctccactgcaagggtagttatcttttctttgcttctgcaataactcacacatggcctgatgtttttgttttaagcatttctgaaacttctgaagtttctgaatcagggagccagggtttatagatggtttaattgcccagctctctctctttttttttaactatttaaggtgggntaagttggggaatgaacttttttcccattaatggggaatcttaggnctcttn

SEQ ID NO: 48 - DNA, 1318 bp, Homo sapiens
ggcacgaggtaactcacatacaggcccgattccacctacagcaaagctggatgcgatggctggcagaggcaaaccctttgcctgcactgcaggccaaagccgggatgtggcctagatggttcctaaggtccctgacaatcctgagatcttgcatcttgtctatttcaggtcaaaggtgcctacatgctccttctagctttgcttccctgatgttccttgccacctgctactcctctctgagctacttttccaggttccacagggagaggttcagctgtccgtggtagacatgagggtagagaatgaggtggttgggttccacttacctttctatcatcttgcagtatggatgtctcttgactggtaccgtgtagacttttgagggcacacaggagtctgcagagagatactggggacattgagcagcagcagtggggttgggaggcagaaatgaggacaggaacatttaccttgtgtttctctcagcttctcagatgaccaagatggtgctgcagatggtgctgaggatggagaacccaccaagccccgctaggagccacctagactggatgcagagcatggtgagctccctgcaggttctctgagaaggggtggatggcagcctgctccttgcctttgtgccctccaggccccaaagtcagggaaccaaaagaagaaaggggccgtagctagggcagagctccactgcaatgattgttttaggggtaggagccaggattgccgtctgtggacactgaaatttgaatctcatatacttttgtgacaaaacattcttcctcttttgttcttctcctaccatctaaaaatgtagaaaacattcttagcctatgagttgcacaaaaacaggcagtggccagatttggcccatagaccatagtttgctgacttctgccctaaatcatcctccatttctttccttctgtgtccttgttactgacaaagccactttccctaaaatggggtctttccctgtttggtgccatgaagccaatatgcaaaaccgaaagtgagcctcatgcagtgcaggctttatttggtggccatggaattgagaagtgagagcttggctcacaaatcaacttttctgctcgtgagacccaggaagtcacagatacagggcatctttagtgaaggggctgagcattaaaagcaaggggaggagtggccaggtgcaatggctcactcccataaacccagaactttgggaggccaaaatgagaggattgctgagaccaggagttcgagaccatcctggtcaacatagtgatacacccccatctctacaaaaaaaaaaaaa

SEQ ID NO: 49 - DNA, 535 bp, Homo sapiens
cgtccggaggaagagcagactgcgggaccccggcctacagcagaccctccggggccagctccgcctgctggagaatgatagccgggagatggcccgcgtgcttggggaattatcagccaggctgctgtccatccacagtgaccaggaccggatcgtggtgacgtttaagacttttgaagaaatctggaagttttccacctaccatgctctcggcttcactcatcactgcctggcaaacctgctcatggaccaggccttctggctgctcttgcccagtgaggaggaggagacggccatccaagtccatgtggatgagaacgccttaaggctgacccacgagagcctcctcatccaagaagggcccttctttgtcctgtgtcctgaccaccatgtgagagtgatgacgggtccccgggatgcaggaaatggcccccaggccctcaggcaggcttcgggggcaccccagggagaggcggcccccggaaacagactcttcaccgccgagccccagcgtgtcctccgaggaggtggcagt

SEQ ID NO: 50 - DNA, 1183 bp, Homo sapiens
  SITE (72): n equals a,t,g, or c
ctgtaatatctctttggaaattcaagattgaacctggtcctaggttgtggccccaggcattgggcattttgnaagccccccaggtgttttcagcttgcagccaggccgagagagagcccctgagtcagatccccatggtttaggcacacctagcgggaggggtggctcctggaccccaccgtggttggagagctgagcatgtgtgtggctttagtggggtctgttagttatgggggtctgggcactggagctgcaggacacttgggatcccaggtcagaaagggccagatgagcaactaggaaagacttgggggccagggcggagtggggtcacctgacactcttgtgaggccccttctagtgcctgctcacaccggaatttcattcactccaagaagccatcaggggtaagataccttcctttaaacgtcactaagaaagaagaggcctgccggtgacacagtaagatgccattgatctaaagatgcgtcttgatttcagaaaggtccggaagtggaaagcaggtttcagggctgctgaggtacagggttctcctgtaggccccagggatggtctcaggggtgctgagtgcgtgcgtggtaaatggatggagcccaggggcgcctcctgccagtgtcctccaggcactcaaacctagcccttctgaagccgacctcacgtgacctcacagcccctcctgaaggcgcctcactgatgacggtgggtggaataacagcccccagagatgtccaggtttggaaccccaggacgtgggaaagtgttaccttgcgtggcaaaagggacccggcgcctgtgcttcagttcaggatttcgtggtggggagatgaccgtggatggttgaggtgggccctgagtaatcatgggggcccttataagggaaggggagtcacgagggtctgcgcatgaagcaaggaagcttctggctgtgaagatggcaagaargcctggggccaggcgatgaggtggcccctggaggagctggaaaaggcattggattctgccccagagcctccgtggagaaacaaagccgcactgacaagacttcagcctggtgaaaaccattttggactcctgacctctagaactgtaagataataaattggtgtggttttcaacctctcaaaaaaaaaaaaaaaaaaaaaaaaaaaaaaaaaaaaaaaaa

SEQ ID NO: 51 - DNA, 1048 bp, Homo sapiens
  SITE (491): n equals a,t,g, or c
  SITE (1014): n equals a,t,g, or c
  SITE (1026): n equals a,t,g, or c
  SITE (1040): n equals a,t,g, or c
atgagatccggcagtttgcacggttcatgacagaaaagctgaacgtgagccacacaggagtccccctaggcgaggagtacattctggtctttagccgaacccagaacagactcattctgaatgaggcagagctgctgctggcactggcccaggagttccagatgaagacagtgacagtgtccctggaggaccacacctttgctgatgtcgtgcggctggtcagcaatgcctccatgctggtcagcatgcatggggcccagctggtcaccaccctcttcctgccccgtggggcaactgtggtagagctcttcccatatgctgtcaatcccgaccactacactccctataagacgctggccatgctgcctggcatggacctccagtatgtagcctggcggaacatgatgccagagaacacagtcacacaccctgagcggccctgggatcaggggggcatcacccatctggaccgggctgagcaagcccttatncctgcaaagccgtgaggtcccacggcatctctgttgccggaaccccgagtggctcttccgaatctaccaggacaccaaggtggacatcccatccctcattcaaaccatacggcgcgtggtgaagggccggccaggaccacggaagcagaagtggacagtcggcctatatccaggcaaggtgcgggaggcacggtgccaggcgtcagtgcatggcgcctccgaggcccgcctcactgtctcctggcagatcccatggaaccttaaatacctgaaggtgagggaggtgaagtacgaggtgtggctgcaggagcagggggagaacacctacgtgccttacatcctggctctgcagaaccacaccttcaytgagaacatcaagcccttcaccacctacctggtgtgggtccgytgcatcttcaacaagatcctcctgggacccttttgcagatgttgcttggtgttgcaaasgtagcgagcaggccacarcctggccttcggggaggttggtttcctgcattttcanggttccctgggnccattaattcccantttgggga

SEQ ID NO: 52 - DNA, 1189 bp, Homo sapiens
ggcacgagcggggtgcccatcccacaggtgtgccgcacagggacttcctgtctaggtaaaaggtcagactagaccttggaatctagaaatcattattcggagtttctgaacagattaggagatgggtatcattcattcattcattcattcattgcaacacattttgtgcaaggcacaggttgaagcaaagcagagttggcgcctgcccacaggagctgagacgcaggtggacaaggtcagatattcacacattgacatgtgtcagccggactatgctgcaaaactgaggcttttggtgcagggagaccacttggtggcaatgcgggggacagagggttagaccaggccaggaaagtggagggcacctttctggaaacacaagctggttgagaaatatcagtgtcacctccaggtgctcatgatatttgtaacccacacagatccaaactcaggacctaggtttggtgtgctggctcagaaggcacagatgtgcacctgccctcagcgcaacccaggtgtggacaggtctgggcctggcctgggcttccgagctctcccctcgcctcgactgggtgcaccttggcggtgtggcttccagagccttcccaaaggtctcctctcacttctgctcccatgtgggagttggaggccccacccagcacaacggttctcactgtgggctcagatgagaaaggaaagtggaagagaatcaagaaagaaattagggtgtggaagcgattatctttccctctgatttaaaggggctgcagggctggcctgcttggctggccacagtgccagcatctgtctgtttgttttttaataacagtacagactaagctggggccatgagatgcatctgaggtcccttacctagagctgtggccacaccctcgtcctctgtcccagagaaggacctaatatccatttggggaagaggaaaggttctcttgccatcctgagttttgttcctaaacaaggtgctgtactttcttgctctctgcacagcaggaaatttgcatttttaatgcccagtgcgcatgtattgactgaaattacaccaatttgcatttttgaggtggtcaaccagtgcagctgactttctcacatttgatagaaaactcaaagccataacaactaatagcaaaggacccggaacgtgaaagcggttgttcagctacctcagttc

SEQ ID NO: 53 - DNA, 652 bp, Homo sapiens
ggcacgagcggagacagatgtcagtactacgtgtgccaccactattgtgtgaattctgaatcatgtaccattggggatgatggaagtgttgaatgtgtctgtccaacgcgctatgaaggaccaaaatgtgaggttgacaagtgtgtaaggtgccatggggggcactgcattataaataaagacagtgaagatatattttgcaactgcactaatggaaagattgcctctagctgtcagttatgtgatggctactgttacaatggtggcacatgccagctggaccccgagacaaatgtacctgtgtgtctatgctycaccaactggtcargcacacagtgtgaaaggccagccccaaagagcagcaagttgatcatwtcagcacaagaagcattgccatcattgtgcctctcgtcctcttggtgactttgataaccaccttagtaattggtttagtgctttgtaaaagaaaaagaaggacaaaaacaattagaagacaacctattatcaatggaggaataaatgtagaaattggcaatccatcttataacatgtatgaggtagatcatgatcacaacggatggaggtcttttagatcctggctttatgatagacccaacaaaggccaggtacatagggggaggacccagtgctt

SEQ ID NO: 54 - DNA, 886 bp, Homo sapiens
  SITE (808): n equals a,t,g, or c
ggttttgtgtcaggtcagtcagcgaggctggggtaggcgagagctcagccgccaccgagcccatcagggtcaagcaggctctggctaccccgtctgccccatatggctttgccctcctgaactgcgggaagaatgaaatggtcattgggtggaaaccccccaagcgtcgtggaggtggcaagatcctgggctacttcctggaccagcatgactcggaagagctggactggcatgcggtsratcagcagcccatccccacccgggtctgcaaggtcagtgaccttcatgaaggccacttctatgagttccgtgcccgggctgccaactgggcaggtgttggcgagctgtcggcacccagcagcctgtttgagtgcaaagagtggacaatgccccagccaggccccccgtacgatgtacgggcatccgaggtgcgggccacatccctggtgctgcagtgggaacccccactgtatatgggggctgggcctgtcacaggctatcacgtcagtttccaggaggaaggctctgagcagtggaagccggtcacctcaggccccatctctggcacccacctgagggtttccgacttgcagccaggaaagagttacgtgttccaggtacaggccatgaattcagctggtctggggcaaccgtccatgcccactgatcccgtgctcctggaggacaagccaggtgcccatgagatcgaggttggtgtggatgaagagggctttatctatttggcttttgaagcccctgaagccccgagtcctcagagttcagtgggtccaaaagaatacaaagggcncaatggaaccccagagggtcaagatcgaaggtaaagttaacaagtccaaggtcatctgaaaaaaaccgggctcgagga

SEQ ID NO: 55 - DNA, 775 bp, Homo sapiens
ggaaaagcagttacacagttgagttgcaagctgaattggctgtgttcaaggcatgccctttagaattgaaagaactagcagattacggtatttagacttgaatatttggctgatattttctggaaattaatggaatgagcctctcacctcaagggaaacaactgatagtgttgccagtgataaagctttcaagcaaaaattggaatttccgaaaatctgtactccaccatgagctttattgttggggatattaacaaatgtgatttgtataatgaaatgcatttcatttggaagaattcaatgaaccatttttccaagtgaccagtacgtgatgttacaaaatcatgcatggctcaaagattgattcaaaagtgtaagacaggccagtggattttaatgtattaacaatataagagtgcattaagttttcggagtctacattgcctttaagaaactatgacttgtagtaagccgggcgcggtggctcacgcctgtaatcccaacactttgggaggccaaggtgggtggatcacaaggtcaggagttcaagaccagcctggccaatatggtgaaagtccgtctctactaaaattacaaaaattagccgggcgtggtggcagatcccttgtagtcccagctactcgggaggctgaggcaggagaatagcttgaacccgggaggtggaggttgcagtgagtcgagatcgtgccactggactccagcctgggtgacagagcgagactccatttcaaaaaaaaaaaaaaaaaaaaaaaaa

SEQ ID NO: 56 - DNA, 639 bp, Homo sapiens
ggaattcccgggtcgacccacgcgtccggcctctcccacggcggcggctctcggtcccccgctccgcgtctttcgggcatacagtgacctcgggcggcgggtcacgtcggccgggcatggctgcatggagcccggccgcggcagcgcctctcctccgcgggatccgcgggcttccacttcaccatcggatgtttgccactcagactgagggggagctcagagtgacccaaattctcaaagaaaagtttccacgagctacagctataaaagtcactgacatttcaggaggttgtggggcgatgtatgaaattaaaattgaatcagaagaatttaaggagaagagaactgtccagcagcaccagatggttaatcaggcactaaaagaagaaatcaaagagatgcatggattgcggatatttacctctgtccccaaacgctgaccacgccctggctgcatagatgctgctgcttaagaccttggatgaacttcactgacatcattcttccctaagcagtcaccaaaaaatttatatattttgctcatatacatttccatattataattatagaagatgtataatctatttagatgttaattaaaggaaacaaacaactgaaaaaaaaaaaaaaaaaaaaaaa

SEQ ID NO: 57 - DNA, 401 bp, Homo sapiens
  SITE (395): n equals a,t,g, or c
attttcatgagttgcagcatctgcatatacaaggcctggatcactttaggatcaatattttgacacgggagaaggcagctcagaaaggattaaggaagatagctcaaagccaaagcagaccctccgtgtgaactttatactgctcacttccgtgtttcccaagtaaatggggaaactgtccaaccttgtcatgtgttgggacttacttactgcttgaggcaaagcattcatcctacatcataaaaaatctccaaagatctctttaagggctgggcatggtggctcactttgggagatggattgcttgagctcgggaagagaccagttcggtctctacaaaaaaatacaaacacaaatataaaaaaaaaaaaaaaaaaaaaaaaaaaaaaaaaaanaaaaaa

SEQ ID NO: 58 - DNA, 559 bp, Homo sapiens
  SITE (134): n equals a,t,g, or c
  SITE (140): n equals a,t,g, or c
  SITE (476): n equals a,t,g, or c
  SITE (527): n equals a,t,g, or c
  SITE (540): n equals a,t,g, or c
  SITE (550): n equals a,t,g, or c
cggcagtgggattactcagtgttgagagaaacaacacggaaagcccagagcagaggagggagaaggccccattctctcagctttaatctactgcacctcggagggcagagctctaaccagacacgctgcaagcntcagantcgggatgaacatcgaggtggggaacatttcttatacaggagccatcatctcctggtcgtcctcggagccctgcctggaggactattaccatattatgtacaggcccaactggaacagcatcttctctggctatcttcgctacagcttccaccacgaggagaaggtgcctcgaacgatcagctccgtggtgctggaacatcttgccccttccactctctacttcctgtgcatcagctgtaagaaggctgccttcccttacaggcactactgcaccatgttccacaccctggataagagtccgctggctcctggaagctccctgggtagacccccanatctctctttgggtgctgatggccattctgctgggcctgcttcacaagccncttgggcttcatnttgcttcaanattttgggg

SEQ ID NO: 59 - DNA, 645 bp, Homo sapiens
  SITE (634): n equals a,t,g, or c
ttttttttaagtaaaaaaccaatatttaataacaattttaaaaacatagctccaggccatccacatgctttaactcatgctcaggctcctgatattgatgggttgtctttgtatttttctgatgcccttttatgtgaattcacctctataagacaaaaaattataatcaaaattattagtatkacagtcacagatattgcgaagatgagtttgttcttatagtcatmtcctgggaacttctttcatgagctcacttgacttctgctctttctgttcattctgttccatgttctcattaatataatttgttttttgttggtccgtatcccattctacattcaatgcctttgcttcctgctgctcgctgagaagcttcatcaggaggcctgttcgcracatgagcttggcacagctcccttgcacatgtgtttctgmacattccattttcaaggtccggataacatgagacatgaactttctcacatcctcgttggggatgagggaccgtactgctcggttagctgaatttcaagctgatcacccccmaagcctgacaakttgatgccactgctgtctgagggcgcctccgactcaataktcagctgagtgctcatgtgctgcttccgggcttgtnacatcttcatg

SEQ ID NO: 60 - DNA, 1102 bp, Homo sapiens
  SITE (273): n equals a,t,g, or c
aaatatgcaggagctatggaatctgaaccctgtgtctgcactgaggctgattttgattgcgactatggttatgagcgacacagcaatggccagtgcctgccggcattttggttcaatccatcctctctgtcaaaggattgcagcttgggacagagttacctcaatagtactgggtacaggaaggtggtttccaataattgcactgatggcgtaagggaacagtacactgccaaaccgcagaagtgcccagggaaagccccgcgggggctgcgngatagtcacggctgatggaaagctgacagcggaacaaggacacaacgtcactctcatggtgcaattagaagagggtgatgttcagcggacactcatccaagtggactttggcgatggtatcgcggtgtcttacgtcaatctcagctccatggaagatgggatcaaacacgtctatcagaacgtgggcattttccgtgtgaccgtgcaggtggacaacagtctgggttctgacagcgccgtcctgtacttacatgtaacttgtcccttggagcacgtgcacctgtctcttccctttgtcaccacaaagaacaaagaggtcaatgcgacggcagtgctgtggcccagccaagtgggcaccctcacttaygtgtggtggtacggaaacaacacggagcctttgatcaccttggagggaagcatatccttcagatttacttcagaaggaatgaataccatcacagtgcaggtctcagctgggaatgccatcctacaagacacaaagaccatcgcagtatatgaggaattccggtctcttcgcttgtccttttctccaaacctggatgactacaacccggacatccctgagtggaggagggacatcggtcgagtcatcaaaaaatccctggtggaagccacaggggttccaggccagcacatcctggtggcggtgctccctggcttacccaccactgctgaactctttgtcctaccctatcaggatccagctggagaaaacaaaaggtcaactgatgacctggarcacatatcagaattgctgatccacacgctyaaccaaaactcagtacacttcgagctgaagccaggagtc

SEQ ID NO: 61 - DNA, 752 bp, Homo sapiens
  SITE (646): n equals a,t,g, or c
  SITE (683): n equals a,t,g, or c
  SITE (692): n equals a,t,g, or c
  SITE (699): n equals a,t,g, or c
  SITE (700): n equals a,t,g, or c
ggctcccggttccaggcgagttcgcagctgcgcgccgggtcctggaggccgaggccgctcccgcccgttgtccccgcagtccccgacgggagcgccatggcccagccgccgcccgacgtggagggggacgactgtctccccgcgtaccgccacctcttctgcccggacctgctgcgggacaaagtggccttcatcacaggaggcggctctgggattgggttccggattgctgagattttcatgcggcacggctgccatacggtgattgccagtaggagcctgccgcgagtgctgacggccgccaggaagctggctggggccaccggccggcgctgcctccctctctctatggacgtccgagcgcccccagctgtcatggccgccgtggaccaggctctgaaggagtttggcagaatcgacattctcattaactgtgcggccgggaacttcctgtgccccgctggcgccttgtccttcaacgccttcaagaccgtgatggacatcgataccagcggcaccttcaatgtgtctcgtgtgctctatgagaagttcttccgggaccacggaggggtgatcgtgaacatcactgcaccctggggaaccgggggcaggcgcttcaggtgcatgcaggctycgccaaggccgntttggaccgawgacccggacttgsttgtggartgggncccaaamanatccggnnaacagctcgccctggcccatagtggcacaaagggctccattttcgggccata

SEQ ID NO: 62 - DNA, 483 bp, Homo sapiens
  SITE (399): n equals a,t,g, or c
ggcacgagcctgcttgaagcctaactgtccaccagaaaggactgctctttgggtgagttgaacttcttccattatagaaagaattgaaggctgagaaactcagcykctatcatgtggaacagctctgacgccaacttctcctgctaccatgagtctgtgctgggctatcgttatgttgcagttagctggggggtggtggtggctgtgacaggcaccgtgggcaatgtgctcaccctactggccttggccatccagcccaagctccgtacccgattcaacctgctcatagccaacctcacactggctgatctcctctactgcacgctccttcagcccttctctgtggacacctacctccacctgcamtggcgcacggtgccaccttctgcagggtatttnggctcctcctttttgcctccaattctgtctccatcctgaccctctgctcatcgcactgggacgctaactcctcattgcccaacc

SEQ ID NO: 63 - DNA, 925 bp, Homo sapiens
tcgacccacgcgtccgcaagaactgtcagcaacagaaaatgagatatgatgctagagagcatttgtccttgactgtaagtacagaggcttaggggaagtgagacataagcttgtaggaataataaacgttctacaataaacgttttggctatcttaagccattgtatgggggggattaggaagtaggagggattgtcctacaacaggcccttatacttcaacagcccaaatattttggtttattcctttttatccataaagtctttattcttcaagtttgggtattatagattaccattgttagcctcccttaatgggaccatatgagccaggcttttaagacggactcattttgaattgagtttcaaactttgaaagtgcaaggatttaatttttaagttgaatcccatgaaaggtgtcatcatcactaggaataacaccctttgtaactacatatagaactgttacaatggtagcagaaaatcctattgatttcatctcacccatttcagataccttcagtgaaattaagggtagtgtgatgtcccatgtaataaaacaggcttagaacatcaattcctctgctgccatttatgtgcttttattcccccttcaaaaattttttattggatatatatatttttcagtattcagactctgaaatctgtcattacaatcaagtgcttgtcacagctgaaagatttctggtggcttaaagtttactagcagtaaatttatgatatggtacagttctttgtacagaaaggcaccattatgttagaataaatttccagaacttagtgggaagaatcaggttttaaccttgtgtgtctgttacttctgagtgcatttctataatataaatgttgatttgcatcaacattataaaagagcacttctgtggctcatttaaaaaaaaaaaaaa

SEQ ID NO: 64 - DNA, 884 bp, Homo sapiens
ccaagggcctgaaagggagggaaaggggagggtagcgggagggtagcaggtgagttcctagggctggaaggtttagcagcagcctggtgcagtgccctgtcatcaagacaaacccacggtcctcctgggtgcctaccaagcttggtttgtacaaaagcaaggtgggagtctatttttgtacatgagatacatcacacttacctgtgggccagtattgtgaagtgagtctgagttgtttacactgatgccttccctgcccaccacaaattgtgtacatagtcttcagatgataccacccactgtatagttctgctttcccagagaggaagaacttttagaaaccaaatgatcttaattgttattgcccacccctggcttttccgggtagaaaattcacagtaggaatgattgttaagagagagtgcttggaaccatgggttaacaggaaaggctacctaacttcacatatctgcaaccagagcagccaccaagcattacttagcagcaggaaaatgattgtatttgagttcctgtgtgtccaaaactgaggcaccatgttctttgaaaacatgccacctcaaggctgggcgcggtggctcacacctgtaatcccagcactttgggaggccgaggcgggcggatcaccggaggtcgggagtttgagaccagcctgaccaacatggagaaaccccatctctactaaaaatacaaaattagccgggcgtggtggcatgcgcctataatctcagctacttgggaggctgaggcaggagaattgcttgaacccaggaggcggaggttgcggtgagttgagatcgtgccattgcactccggcctgggcaacaacagcaaaactccgtctcaaaaaaaaaaaaaaaaaaaaa

SEQ ID NO: 65 - DNA, 1268 bp, Homo sapiens
ggcacgagcggcacgagctcgtgccgaattcggcacgagtggagacgccgtgactttgaagtgtaacttcaagacagatgggcgcatgcgggagatcgtgtggtaccgggtgacggatggtggcaccatcaagcaaaagatcttcaccttcgacgccatgttctccaccaactactcacacatggagaactaccgcaagcgagaggacctggtgtaccagtccactgtgaggctgcccgaggtccggatctcagacaatggtccctatgagtgccatgtgggcatctacgaccgcgccaccagggagaaggtggtcctggcatcaggcaacatcttcctcaacgtcatggctcctcccacctccattgaagtggtggctgctgacacaccagcccccttcagccgctaccaagcccagaacttcacgctggtctgcatcgtgtctggaggaaaaccagcacccatgccaaccacagagaacataccagagacggtcgtgagccgtgagtttccccgctgggtccacagcgccgagcccacctacttcctgcgccacagccgcaccccgagcagtgacggcactgtggaagtacgtgccctgctcacctggaccctcaacccacagatcgacaacgaggccctcttcagctgcgaggtcaagcacccagctctgtcgatgcccatgcaggcagaggtcacgctggttgcccccaaaggacccaaaattgtgatgacgcccagcagagcccgggtaggggacacagtgaggattctggtccatgggtttcagaacgaagtcttcccggagcccatgttcacgtggacgcgggttgggagccgcctcctggacggcagcgctgagttcgacgggaaggagctggtgctggagcgggttcccgccgagctcaatggctccatgtatcgctgcaccgcccagaacccactgggctccaccgacacgcacacccggctcatcgtgtttgaaaacccaaacatcccaagaggaacggaggactctaatggttccattggccccactggtgcccggctcaccttggtgctcgccctgacagtgattctggagctgacgtgaaggcacccgccccggccactccatcaggcactgacatctccgcgaccggttttcatttcttttctaaactatttccagtcttgttcttagtctctttccatctgtgtcttggcttcttcagtcggtttaattaaaacaaacagaacaattttccccaaaaaaaaaaaaaaaaaaa

SEQ ID NO: 66 - DNA, 1286 bp, Homo sapiens
gcagctggccctggtactgtgcactgtggacagccgcccgcccgcccagctggccctcagccacgccggtcgcctcttggcctcctcgacagcagcctctgtccccaacaccctgcgcctggagctgcgagggccacagcccagggatgagggtttctacagctgctctgcccgcagccctctgggccaggccaacacgtccctggagctgcggctggagggtgtgcgggtgatcctggctccggaggctgccgtgcctgaaggtgcccccatcacagtgacctgtgcggaccctgctgcccacgcacccacactctatacttggtaccacaacggtcgttggctgcaggagggtccagctgcctcactctcattcctggtggccacgcgggctcatgcaggcgcctactcttgccaggcccaggatgcccagggcacccgcagctcccgtcctgctgccctgcaagtcctctatgcccctcaggaygctgtcctgtcctccttccgggactccagggccagatccatggctgtgatacagtgcactgtggacagtgagccacctgctgagctggccctatctcatgatggcaaggtgctggccacgagcagcggggtccacagcttggcatcagggacaggccatgtccaggtggcccgaaacgccctacggctgcaggtgcaagatgtgcctgcargtgatgacacctatgyttgcacagcccaaaattgctgggctcaatcagcaccatcgggcggttgcaggtagaaggtgcacgcgtggtggcagagcctggcctkgacgtgcctgagggcgctgccctgaacctcagctgccgcctcctgggtggccctgggcctgtgggcaactccacctttgcatggttctggaatgaccggcggctgcacgcggacctgtgcccactctcgccttcacccacgtggctcgtgctcaagctgggatgtaccactgcctggctgagctccccactggggctgctgcctctgctccagtcatgctccgtgtgctctaccctcccaagacgcccaccatgatggtcttcgtggagcctgagggtggcctccggggcatcctggattgccgagtggacagcgagccgctcgccagcctgactctccaccttggcagtcgactggtggcctccagtcagccccagggtgctcctgcagagccacacatccatgtcctggcttcccccaatgccctgagggtggacatcgargcgctgaggcccarcgaccaargggaatacattgtctgcctc

SEQ ID NO: 67 - DNA, 902 bp, Homo sapiens
ggacggggatcctgatgctctcaccccaccctccgctgcctctgcttctgccaaggtggccgacactgggccccctaccgaccgtggcgtccaggtgactgagcacggggccacagctgctcttgtccagtggccggatcagcggcctatcccgggcatccgcatgtaccagatccagtaccaacagctcggctgatgacatcctcgtctacaggatgatcccggcggagagccgctcgttcctgctgacggacctggcgtcaggccggacctacgatctgtgcgtgctcgccgtgtatgaggacagcgccacggggctcacggccacgcggcctgtgggctgcgcccgcttctccaccgaacctgcgctgcggccatgcggggcgccgcacgctcccttcctgggcggcacgatgatcatcgcgctgggcggcgtcatcgtagcctcggtactggtcttcatcttcgtgctgctaatgcgctacaaggtgcacggcggccagccccccggcaaggccaagattcccgcgcctgttagcagcgtttgctcccagaccaacggcgccctgggccccacgcccacgcccgccccgcccgccccggagcccgcggcgctcagggcccacaccgtggtccagctggactgcgagccctgggggcccggccacgaacctgtgggaccctagccaggcgcccccccctctaagggtcctctggccccacggacagcaggacccggacaccctgtgggacctggcctcaaactcaccaaatcgctcatggtttttaaaactctgatggggagggtgtcggggacaccggggcaaaacaagaaagtcctatttttccaarmttgggcgaaacaaaaaaaaaaaaaaaaaaaaaaaaaaaaaaaaaaaaaa

SEQ ID NO: 68 - DNA, 1184 bp, Homo sapiens
ggcacgagatttattttggcagaacagacaaaaggacgtggaatgtactttctgctacagccattacagtcaactagatttgagtgctgccgctggtaagttaattgaatagccaagttatgttgtccttacccaagtagacagtggaaaggaataatggcagaggccatgatgcgagtctggccacagccatgcatcccatctgtggtgatcttagtcctgagatcacctatgtcctaggccacgaactgaatcatgtactagtaccatatcatctgacttcgtagctttccaggggaaaagactaggagatccggacatgactaggtctgtgtcctcagtcacataagctgtgctgcgtacacttgaactgcactacacaacattgccctgggccttgacctgtacttctaaatgttataataaaccttttggtaaggtgctgcctgagaactgctttgttttccagagggatcattgctcaggctttttcccccggataatttgaactatttgacgattcctatttggtttgtatcttagagagaaagccccgccttcctgataaacagcaggtcaccttctcatgtgttcctctgaggctgttcattcacatctgtagttggactcctcctactgtcttctttactgctcctgacctgcactgctgctaattcaaatcctcccttttcccccagaaagctatgaaatcagatatactacatgattcaatttagttgaaaaagtccaatcttggccctcatttagctagaaaaccacaaatatctactgtcttttaaagttttgagacttgagatataaaaggaaacagaccaacatcatagtgttttattgacaaaaccataggaaaaggcagttttaggatgtaaagtaaaaatggttctctgaaatatctacacaaacgtgaattctgaaaagttttcattaaaatcgtatttcatacaattataaactaatgaggaacaaaacaattttcaacttctccataacccagactgagcttgatttatgcttgccatacagaagcaggaactcttcccagagagggtggtggctcccacacagctgacagccaggtttggctgttacctaagccccatcttcccagtcggtgttcaaaacaagggcacaaggtctggcttttcaaaaaaaaaaaaaaaaaa

SEQ ID NO: 69 - DNA, 338 bp, Homo sapiens
  SITE (255): n equals a,t,g, or c
  SITE (284): n equals a,t,g, or c
  SITE (303): n equals a,t,g, or c
gtttgaagctatggcattcccccactatgagcccacctgtcagccaggctatctgccttgatcctagatgaagtggccattctgcctgcccctcagaacctctctgtactctcaaccaacatgaagcatctcttgatgtggagcccagtgatcgcgcctggagaaacagtgtactattctgtcgaataccaggggtgagttttttcttttaatagttcttctcccttaagcagaattggttcctggaaggcatancccttcctcctgagcccaaggtggctttntgagtccaggggatagatnatccccaaagatctaccccctctgtctgcatgggc

SEQ ID NO: 70 - DNA, 722 bp, Homo sapiens
ggcacgagctccatcgcccccccccaacaaaaaaaaaagtttcccatacactggcctgccccaaaacccactaacaattttagcaaaacagtccaggccaaagaggaagcatttcatgttcaataagaaacccagccattccgcatggctggttcctgagtggctctggtgatactctccagccacctgctgacattcagaatctcagacctcgggactgctgttgcggtaccgtgtgtctgacacctgccagcagccctttgctatctgcgcgcaggatgggggtgactgcccagacattcccgctagataggctctgatttccggggcagcctttcagatgcggcagacatacaacacctgtactttagagttttaagggaaaaaaaacagaagtgctggttagatagtaaaaacttaggataacttagaaaggctagttttagcttcctttgtggctccctggtgcaaaacaattagcagttatgcaatggacctgattctagtttattctaattaagaagtgaggccgagtttgacttcgttcctgaatacaatcttgagtaactgggaaagtctgagtgaaaggatggcctcattctctttctaatcttgctggtttcaagattagaaaatggcattatttgatctgaaatgtttgagaagacacgaataaagttacttgggcagaaaaaaaaaaaaaaaaaaaaaaaaaaaaaaaa

SEQ ID NO: 71 - DNA, 600 bp, Homo sapiens
aattcggcacgagtgactcatcctcctggaaagaaatttcaagggataaagcaccatggatctaacttatattcccgaagacctatccagttgtccaaaatttgtaaataaatcctgtcctcccaccaaccgctcttttcatgtccaggtgataatgtattcggttatgactggagccatgattatcactattcggaaacttggttataatggtttccatatcgcatttcaaacagcttcactctcccacaaactttctgatcctctccatggcaaccacggactttctgctgggttttgtcattatgccatacagcataatgcgatcagtggagagttgctggtactttggggatggcttttgtaaattccacacaagctttgacatgatgctcagactgacctccattttccacctctgttccattgctattgaccgattttatgccgtgtgttaccctttacattacacaaccaaaatgacgaactccaccataaagcaactgctggcattttgctggtcagttcctgctcttttttcttttggtttaggtgttttttcactgccccctttgtgttttcaggcacatggctgatgac

SEQ ID NO: 72 - DNA, 628 bp, Homo sapiens
ttttgttcctacgtaaaagttctttgtgctctttatgatatttcggtggggtatctgaaagatttcaagctaagcggctgccacacccctcccagctactgtccttggacccaggcaagccaggctcctgctcttgtccctcgccggagggagcgcagcgttttggaacaccttcctcgaaattccaagtctgagactctagtctttagcatagtcccggcactggggtggcgacccgatccgagaaagagacccagcgcgtgagtcgctcctattgacaggtgtggcatttcttacatgggatcgtcagaaatttggccgccaaaacggaactgacgcactgatctggggtgaccttcactcacatcggacacagtttgggtctctgggctaccgatgggctaccgccaattcttgaccttcagccgcagtgtggattcatgcggcggctctcaccacccgtgttgtcacctggaggctacctcgtgtctgcacccgacagcagagggggagctgtagcaggagtcttttataccctgtgctctatccccacttccgcccctggccccatggcggtcgcccatccccgcgactggctccacacctagtgtcaggttgtccccaggga

SEQ ID NO: 73 - DNA, 336 bp, Homo sapiens
  SITE (172): n equals a,t,g, or c
  SITE (307): n equals a,t,g, or c
  SITE (336): n equals a,t,g, or c
ggcacaggtggccaccaagggggcagtaacagccatgaccaaagctttggccctggatgaaagtccatatggtgtccgagtcaactgtatctccccaggaaacatctggaccccgctgtgggaggagctggcagccttaatgccagaccctagggccacaatccgagaggsnatgctggcccagccactgggcsgcatggggccagcccgctgaggtcggggctgcggcagtgtttcctgggcctccgaagccaayttckgcacggggcattkgaaacttgctcgtggacgggggggttgccagagntggggttacgggttgcaaggccattcggn

SEQ ID NO: 74 - DNA, 2782 bp, Homo sapiens
ggcacgagcgaggactctggttcctacaacttccgcttcgagatcagtgaggtcaaccgctggtcagatgtgaaaggcaccttggtcacagtaacagaggagcccagggtgcccaccattgcctccccggtggagcttctcgagggcacagaggtggacttcaactgctccactccctacgtatgcctgcaggagcaggtcagactgcagtggcaaggccaggaccctgctcgctctgtcaccttcaacagccagaagtttgagcccaccggcgtcggccacctggagaccctccacatggccatgtcctggcaggaccacggccggatcctgcgctgccagctctccgtggccaatcacagggctcagagcgagattcacctccaagtgaagtatgcccccaagggtgtgaagatcctcctcagcccctcggggaggaacatccttccaggtgagctggtcacactcacctgccaggtgaacagcagctaccctgcagtcagttccattaagtggctcaaggatggggtacgcctccaaaccaagactggtgtgctgcacctgccccaggcagcctggagcgatgctggcgtctacacctgccaagctgagaacggcgtgggctctttggtctcaccccccatcagcctccacatcttcatggctgaggtccaggtgagcccagcaggtcccatcctggagaaccagacagtgacactagtctgcaacacacccaatgaggcacccagtgatctccgctacagctggtacaagaaccatgtcctgctggaggatgcccactcccataccctccggctgcacttggccactagggctgatactggcttctacttctgtgaggtgcagaacgtccatggcagcgagcgctcgggccctgtcagcgtggtagtcaaccacccgcctctcactccagtcctgacagccttcctggagacccaggcgggacttgtgggcatccttcactgctctgtggtcagtgagcccctggccacactggtgctgtcacatgggggtcatatcctggcctccacctccggggacagtgatcacagcccacgcttcagtggtacctctggtcccaactccctgcgcctggagatccgagacctggaggaaactgacagtggggagtacaagtgctcagccaccaactcccttggaaatgcaacctccaccctggacttccatgccaatgccgcccgtctcctcatcagcccggcagccgaggtggtggaaggacaggcagtgacactgagctgcagaagcggcctaagccccacacctgatgcccgcttctcctggtacctgaatggagccctgcttcacgagggtcccggcagcagcctcctgctccccgcggcctccagcactgacgccggctcataccactgccgggcccgggacggccacagtgccagtggcccctcttcgccagctgttctcactgtgctctacccccctcgacaaccaacattcaccaccaggctggaccttgatgccgctggggccggggctggacggcgaggcctccttttgtgccgtgtggacagcgacccccccgccaggctgcagctgctccacaaggaccgtgttgtggccacttccctgccatcagggggtggctgcagcacctgtgggggctgttccccacgcatgaaggtcaccaaagcccccaacttgctgcgtgtggagattcacaaccctttgctggaagaggagggcttgtacctctgtgaggccagcaatgccctgggcaacgcctccacctcagccaccttcaatggccaggccactgtcctggccattgcaccatcacacacacttcaggagggcacagaagccaacttgacttgcaacgtgagccggaagctgctggcagccctgctaacttctcctggttccgaaatggggtgctgtgggcccagggtcccctggaaaccgtgacactgctgccgtggccagaactgagctgccctttacgcctgccgatcctgactgaggctggtgcccagctctccactcccgtgttcctgagtgtaattatcccccggaccgtccaaagctgtcagccctcctagacatgggccaggccacatggctctgttcatctgcactgtggacagccgccccctggccttgctggccttgttccatggggagcacctcctggccaccagcctgggtccccaggtcccatcccatggtcggttccaggctaaggctgaggccaactccctgaagttagaggtccgagaactgggccttggggactctggcagctaccgctgtgaggccacaaatgttcttggatcatccaacacctcactcttcttccaggtccgaggtgagtgtcagtcttctgaagatatggtagactctgatgccctggggactactctggtcagactttgggctgggtgctgtgaattttgtgcagaaatatgtctttttcagtcctggtaagggcagtttccagccagcagaaggcctccctttgcctccagctagatattttcacctgtaataactgcagcagccactaggaggcaatggcaattcacagagtggcttgcttggtgggagcactttctgaaataacttgttttgtgatcatataattttgttacatagtaaacattctcatacatatgtatatttatattatgcatatatgtttatgtatgagtatatacacatacaaatatacattatgtgtattcttatgcataaaaaaaaaaaaaaaaaaaaaaaaaaaaaaaaa

SEQ ID NO: 75 - DNA, 509 bp, Homo sapiens
  SITE (136): n equals a,t,g, or c
  SITE (477): n equals a,t,g, or c
ggggtgactgcgtgttccccatcgactggccaagcactcgccgcagcaaccagcatgggaagccatgttacaaggaatgcatcgactgcctgatcgaagacggctcgggcggagggcttcttcggccatgtaccgnggggctgcagtgaacctcactctggtcactccagagaaggccatcaagctggcggccaacgactttttccggcggctgctcatggaagatgggatgcagcggaacctgaagatggagatgcttgccgggtgtggggctgggatgtgccaggtcgtggtgacctgtcccatggaaatgctcaagattcagctgcaggatgctggacgcctggccgtccatcatcagggctcggcctcagcaccctccacctccaggtcctacacaactggttcggcttccacccacaggcgcccctctgccaccctcattgcctgggagctgctccgcacttcaggggcctngctgggctcttacaggggcctgggtggccact

SEQ ID NO: 76 - DNA, 1148 bp, Homo sapiens
  SITE (35): n equals a,t,g, or c
ccttaaccacagatcttttgctctcgatgtgagcnagtggtaaaattaaattaaaatgtggggtatttttgccctcccttttattctttctaatggacatggaaatgaacatcaaactgggagaaagaaccatttaacatttaattaatttaaaatagtgtattgagcaccggtatgtgctctggccataaaagaattcacagtccaaaactaggagcaaggcagcaaacatcatcttctccagtgtgatgatatataacagaggtttgtacaaagcgctgtcaaaatacagggaaataactgcctgtgagtttgtggaatgcttcacaaagacagttgatctgagccatcagcaagaagtcaagttgaaggacaaggacagcagtgcaaaatgtggattatgtcacaatctggcatagttggatctgtgagtttaaaatgaaatagttactgctgagataccatttcttctctttgcaaggatacacatattcaacatacacaagagaggaatgtaaagaagtgcctaggcctcctgttttattgttttgttttgttattaatcttcmttttcttttggratctgcctaagagttatggcaactgatgatgagaactaagactaccmatgttaagtaagttcagcatttcaattaagtctcaattaagttgtgcctatactgatattatttccctagatccagaaactgactctattgaaggaaaaaaatctgatatcaatctttttaaaaggggaggaatgtgggagaaagcatgaaaatggctactgggaaaacttatttgtgttacctttctgaaggaaaatacattttttattccttcaattgttgaacctttcctccaccctcaggagttgtgaacagatgtgtgtacagcacaaccaaggcagccgtgattggcctcacaaaatctgtggctgcagatttcatccagcagggcatcaggtgcaactgtgtgtgcccaggaacagttgatacgccatctctacaagaaagaattacaagccagagggaaatcctgaagaggcaccggaatggatttccctggaaggggaccaaaagaccggggaagattcgccaactgccaggaaggaaattagccatggctctggcggggtattttgggct

SEQ ID NO: 77 - DNA, 3957 bp, Homo sapiens
ccacgcgtccggtcatcagctggggcgcgctgggcttggagctggctgtgtccgtgggctccagcgacttctgtgtggaccctgacgcctacgtgaccaaaatggtggaggagtactcggtgctgagtggggacatcctgcagtactacctggcctgctcgccccgcgccgccaaccccttccagcagaagctgtcgggcagccacaaggcactggtggagatgcaggatgtcgtggctgagcttctgaggaccgtcccctgggagcagccggccactaaggaccccctcctccgcgtccaggaggtgctgaatggcacggaggtgaacctgcagcacctcaccgccctggtggactgccgcagcctgcatctggactacgtgcaagcgctgaccggcttctgctatgacggcgtggagggcctcatctacctggccctcttctccttcgtcacagccctcatgttcagctccatcgtctgcagcgtcccgcacacctggcagcaaaagagaggccctgatgaggacggggaggaggaggccgctccagggccgcggcaggcgcacgacagcctctaccgcgtccacatgcccagcctgtacagctgtggcagcagctacggcagtgagaccagcatcccggccgcggcccacaccgtcagcaacgccccggtcactgagtacatgagccagaacgctaatttccagaacccccgctgtgagaacaccccactcattgggcgcgagtccccgccgccctcatacacctccagcatgagagccaaatacctcgccacgagccagcctcgccctgactccagcggcagccactagaccgcgcccggcagccacccaccccacgtgccaacttcccctccccgtgccagcactgccgcttccacctgggccacccaccggaccctcgcacgccgtgccaggcctgccccagacgcgtctgcaggccgcttgccctcctgtcccctccccgcaggggcacagtggagacgcaggggctctgggcccgtaccgccaactcgggtcacacctgaacgctgctgccagccgatgccccagccctgcacgccacccactatcccggcacgctccctctgcagatggtcgccgcacctacaagccctggccgcacccaacctgtgttgttgccgcccggcccttccctccacagctctccttcctcccgcccggcacttctgtggaccccttcttagttcacaggcacggctggggccgctctgtgctggcgcctgctggccactgagggacagggacacgtgccacctgctcatctctgccctgaggtcaccccgtggtccctccacgtgcccatctctctgcagtgccctcctcgcctgtgcagcccgcccacccacaggctcacccctcctgccggctgccagaggccccctccagcagggcctctctccgttgccccagcttcactctctccgtggacagcaggggccacgtggagcccgggccgctcacccgccacccagtgctggccgccttcttggtgccaaacccccttcccccacccagagactgggcagctgtgtctggttcgttctttgcactaaccacatttgtcatctctagggcaggctggggctgcgggctgagggggaccgctggcaccccccttccctcccttcttggttccatttccatccatgacaggtacagcatcccaggagcccggcctgaggggctggacccgagccggctgtgaacatccctcagcccctgctgtccccccttgggactaaccactaacctcacccccaaactccacgggtgcccctagctggcccagagccggcagtgtgagcccaagtccgggctggagccgaggccggagcagctgtctgggagtcaaggctgcagtagcgtttcttcatggggtgctccaggggatgccacagaccgacaggcagcccaagggcctggacacccctccccaggcaggtgctgccccaggaggactgtcctcgggaatgaacctcccgcgggctttggactgaggtccctgtggcctcggtctcctccccatgaagtgggagcgaggctccccaatggtgcttttggctttagtgtacgatgtttgctgtgcttcccgccgtggagggcagagccaccccacatcaggatcggacgtgctacccctcccggtcccggccctggcccagccagcccagccctcgaggctcgatgcctgtgccaaggccaggggcagccagagggcagctggatggccacgtgcaggggtcaaggctgggccctgcagtggggcgggccgccagccccagcagtttacagacgcatggctcttcctcccagagcagccggcagctacctggaccggaaatgtcctcatcccctccctggggccaggctctgccctggccttcctctgtgaacccctcctttctttgtgctggtgtctgggaccaaaaagggggaatatgggagggcagagtggggaggggagtccatgggcctggggccccaagccggggcgtctgagctccccaggcatgaccaaacctcagtggaggggcctctgcttcaggccccgcctggctgacattctgagcccccctcggaggccccgccacagccaacctgcccagtctttcctctgggcttgacccgccaggggagttctccaggcctagggccaggagagaggccctggcaccctggcgtgggtgcccgccaaacgccctgcgaccgctcagaagcacaaatgctgtccatggccgtgaggctgcctgccaggtgaatggacatagcgtgagaggcggtgaggccagggcttccagcctcgtgctgtctcgggactcctgaccgtggtgtgcgtgtgtgcccgtctgtgactttctactcaccaaggttgaagaaaggaaacggggaaaatcaaaaggggttcaaaccccacctcagtaggtggaggggagcgcctgccattggttgtatttttgttctgagttttcggtgccgtgttcctaactactccatcccatgacctcgccacacctactggggcatctggctggtgcctgctgccatggccagcccccactctcaccctgcacagggggtcttgcagcccccaggcccacagcctcgttgggaggacagggtggccctggggacaagagggaggagcccaggggcttacctcactgagagtgctccccagcaggcatccactaccccagggccccccacatgtcatggcaaggttggtagtgaatgggcctggttgggagcagcccctggcccattgcccacccacccatctcactatgcaattcgagttccaagcaacatttgctcctgccctggggccagctctgccccagccctgagaggggtggtgaggcagccccctggaccccagaaccccagacaagggggcaggcgggggaccagggcctctcctgtgggatctttgttttgtgtttaaccataatggttgtgtactgaaccacttcatatttgttatatataatatatatatatataatctccttaagactcagcctcctggtttacccccccggcctgggcatctgacctcccccaccccagtgtgatttaacatccaggaactgaggcctgaaccattttgcatttccccctcctccagcctctgtagggccatggctgtatgtactgtcgctgtgtttttttgtttttttagaactgggtttgggggctgatttttatttctttgggggctttttttcttggcaaatactaaaaatctcgtcaatgtaatttctgtggtttctattcagcttgggtttcatgttttaaaataaattttaaaaagcaaaaaaaaaaaaaaaaaaaaaaaaaaaaaaaaaaaaaaaaaaaaaaaaaaaaaaaaaaaaaaaaaaaaaaaaaaaaaaaaaaaaaaaaaaaaaaaaaa

SEQ ID NO: 78 - DNA, 1297 bp, Homo sapiens
ggcacgagccgaggcgggaggatgaagttgattgactatggtctctccggctaccaggaagagtctgccgaagtgaaggccatggacttcatcacctccacagccatcctgcccctgctgttcggctgcctgggcgtcttcggcctcttccggctgctgcagtgggtgcgcgggaaggcctacctgcggaatgctgtggtggtgatcacaggcgccacctcagggctgggcaaagaatgtgcaaaagtcttctatgctgcgggtgctaaactggtgctctgtggccggaatggtggggccctagaagagctcatcagagaactcaccgcttctcatgccaccaaggtgcagacacacaagccttacttggtgaccttcgacctcatagactctggggccatagttgcagcagcagctgagatcctgcagtgctttggctatgtcgacatacttgtcaacaatgctgggatcagctaccgtggtaccatcatggacaccacagtggatgtggacaagagggtcatggagacaaactactttggcccagttgctctaacgaaagcactcctgccctccatgatcaagaggaggcaaggccacattgtcgccatcagcagcatccagggcaagatgagcattccttttcgatcagcatatgcagcctccaagcacgcaacccaggctttctttgactgtctgcgtgccgagatggaacagtatgaaattgaggtgaccgtcatcagccccggctacatccacaccaacctctctgtaaatgccatcaccgcggatggatctaggtatggagttatggacaccaccacagcccagggccgaagccctgtggaggtggcccaggatgttcttgctgctgtggggaagaagaagaaagatgtgatcctggctgacttactgccttccttggctgtttatcttcgaactctggctcctgggctcttcttcagcctcatggcctccagggccagaaaagagcggaaatccaagaactcctagtactctgaccagccagggccagggcagagaagcagcactcttaggcttgcttactctacaagggacagttgcatttgttgagactttaatggagatttgtctcacaagtgggaaagactgaagaaacacatctcgtgcagatctgctggcagaggacaatcaaaaacgacaacaagcttcttcccagggtgaggggaaacacttaaggaataaatatggagctggggtttaacactaaaaactagaaataaacatctcaaacagtaaaaaaaaaaaaaaaaaa

SEQ ID NO: 79 - DNA, 993 bp, Homo sapiens
ttttttttttttttttttcactggacagcactttrttgacaccctcggacccggggcagggtcagcaagactcccagctggcatcagactgtgtctggcctgctgtcgccatccctgaggggtgcaggacagagccccataggggcagagaggcctccctgggaccagaggaggatgctgtgcagccaggcccatccccagcactcgaggcctaggaggagaggtgggctctggcagcgggtgtgaggtggcagtgagaagccaggccctcaggtgcagctcaggcctctgccgctggggcctcatagttgagcacgtagtagtcgtggacgtacatgaggacggctattggctgtccgatgatgagcgacagccacacagctgcgttgccatagttgccctggaaaaagcggcccacgaaccaggccagtgggatctgagccatcatgcccgtgaacgcccagaggcggaacattcgcagagggacgctcaccaggtactcgtggaagaaggccgaggccaggaacacccctgtcctggccatccacttgctgctgccccgtcgaagcatgggcttgtagaagtgtctgatgcaccacttgtgcacagggatgttccagttctgccagaagtaggtgacagactcggagttccaccagtcccggtagaactcccggtctccaaactgcatgagctcagccacggcattcaggcaggagtggaagagccagtagaagaagatgagccagatgaggtgattggggaccgccagcttcaggaggcgctcgatgatgcgtgagtagtccatgtccttgaagggcttcatggagttctggatggtggggaccatccactgctggatcagccccacctggagctgggtgaagaacagcatctcaaggatccgtcgcagcagaaagcgcttccggatgcggggagagcggggaaagttgagctcgtagcacaaggtgggggcgaagaggaagtagtaga

SEQ ID NO: 80 - DNA, 346 bp, Homo sapiens
  SITE (231): n equals a,t,g, or c
  SITE (272): n equals a,t,g, or c
ggcacagccagcttcgccgacaccaccgaagcgcagttcgaccaactggtggcgatccacttcaagggcccgtttttcctgacccagaaactgctgccgctgatcaggacggtggccgcatcatcaatatctccagcggcctggcgcgcttcagcctgccgggttattcggcctatgcctcgatgaaaggcgcggtggaagtgctgacccgctaccaggccaaggaactgngtgcccgtggcatcaccgtgaacaccctggcccccggcgcnattgccaccgacttcagcggcggctggtgcgcgacaatccggacgtgaacgcgatggtcgccaacaacaccgcc

SEQ ID NO: 81 - DNA, 598 bp, Homo sapiens
  SITE (581): n equals a,t,g, or c
  SITE (596): n equals a,t,g, or c
gctgaggattgtctgttcatcccaggtggtctagtctgcctggatcagatgtccttccctgctgctgttgggcaggcagctcagccttttggctccagccagctctggtgtgactgtcaacgccctgcaccccggcgtggccaggacagagctgggcagacacacgggcatccatggctccaccttctccagcaccacactcggtgagtcccctcccagcctggggtctccacgtggagccctccacccctgctttctcagcccagggcccaggaccctccctcagagaccgtccctgaggcctcatgcctgctcctcgcctacgtcttctgaggcacagagcacaggtccctttcctccgttgacctggcctgccagcctctaacagccccgggaagcaggcagagcctgctgggcggatgagaaaaccgtgtctcagaggaagaggccgtggagctgacgcctggagtcagctgtactcaggggcccatcttctggctgctggtcaagagccccgagctggccgcccacccagcacatactgggccgtggcggaggaatggcggatgttttccggaaantaatttcgatgggantc

SEQ ID NO: 82 - DNA, 642 bp, Homo sapiens
actggcttctacttctgtgaggtgcagaacgtccatggcagcgagcgctcgggccctgtcagcgtggtagtcaaccgtaagaggccagggtggggtggcactggacacatcagagcaggaccagatggtggagccccaaggaagggttggggtcctgggcatgggaacttcaaggccacttacctgraggtggccttgagctcatgtcccagctctgcacacctgggcaatgctttgacctccctagttccctcctattttatatttggaagtttaaacttatgaaaagttgcagagaaagacaaataatgattatatacctttaacctagatttcccatttattaacattttggcacatttgcttaatctttctcgctgtctacacagacacacacacgcacatacatacatataaagtatggatatagacttgcatatatacaggtgcacttgtgtgtatgcacatccactctatgtggacatgggcacttatacatatatggacactctatatacatatgcayagttatttagtatctacctacatatttatatcctgaagttgcagacatgaggcctctttaccgctaaattcctaagatcattctcttacatatccacaatgcaatgatcatgatca

SEQ ID NO: 83 - DNA, 506 bp, Homo sapiens
  SITE (345): n equals a,t,g, or c
  SITE (370): n equals a,t,g, or c
  SITE (395): n equals a,t,g, or c
  SITE (415): n equals a,t,g, or c
  SITE (428): n equals a,t,g, or c
ggcacgagcctcagccccaccccagccccagcctcgccctcatcaccgaccccagccccagccagcttgggttcctcttcgtaggctccaccaagggtgccctggacatgctgaccaaggtgatggccctagagctcgggccccacaagatccgagtgaatgcagtaaaccccacagtggtgatgacgtccatgggccaggccacctggagtgacccccacaaggccaagactatgctgaaccgaatcccacttggcaagtttgcttgaggtagagcacgtggtgaacgccatcctctttctgcttgagtgaccgaagtgggcatgaccaagggtttccatttgnccggtgggaagggggttttttgggnctgttgagttccttccaaaaaactnaagccccatggcgtgttcancctaaccccaatncttccattaaactgatttgttgcccaaaaaaaaaaaaaaaattgggggggggcccgtaaccaattggccttaaggggg

SEQ ID NO: 84 - DNA, 862 bp, Homo sapiens
  SITE (138): n equals a,t,g, or c
  SITE (649): n equals a,t,g, or c
  SITE (704): n equals a,t,g, or c
  SITE (855): n equals a,t,g, or c
tcgacccacgcgtccgcccacgcgtccggtaattcctgaaacatctgtatccagtactgtttccagcacacaaactatggtaacccagcagaccattaaaactgaatcatccagtacaaatggggcagttgttaaagntgaaacttcactaacaacattcagtaccaaatctgaagttgatgaaacatatgcactgcctgcaacgaagatcagccgtgtagagacacatgctacagcaacgccgttttctaaataaataactgaagtgcacatttgttttgagcttctggaaacagtgtctcatttataagaagatggctttaaaagraagagactccttcaaatccagtggccacagtgaaagcgggagaacgacaatggtgtgatgtgggaatttttaaaaataatacagctttggtgagccagttttatttgctgccaaaagggaagcaaagcatctcaaaggtaggaaatgcagatgtacctgactacagcttgcttaagaaacaagatcttgttccaggcacaggatacagattcagggttgctgcaatcaatggttgtgggataggtcctttcagcaaaatcagtgaatttaaaacttgtattcctggttttcctggagctccttctgcagtcagaatttcanagaatgttgaaggtatccacctttcctgggaacctccaacctcaccttctggaanatattttggaatattcagcctacttggctatccgcacagcacagatacaagataatccaagtcaacttgtgttcatgaggatttattgtggtcttaagacatcatggatagtaactgctgggcaactggcaaatgcacatattggattatncatccat

SEQ ID NO: 85 - DNA, 2241 bp, Homo sapiens
cggctcgtgggccgatactgcaatataaggatcaaatgagaaacacaagtacagctggccatccgtgtcagcaggttctgtaaccacaaataccgggggagggaagaccatacctgaaaatgctttacaaactaagttgtacgatagtctcaatgggttcaaaacaaatgaactgaaggacatcactgcccaacatgagatgtactgcaccttcaataacatcttcctctgatccactcagatctttcttatcttcagtctcaaagtcataggctctcgtaaactgatcttccacagacggcttcccagatttcctggaatacttttttccggaggacaccatatttagatgcttcctgactttaaaaaacaaatttctttaaccttctgaatgcaaagacatcattttaatacactggtaaaagtttaaatatcaaaggagatatcgaacaaggattgttgaatacaattttaacagtttcctcatttatttggggggccaaaagttaagaagataatgacatttgttaaaaaataataaaataaataggccaagcacggtagctcacgcctgaaatcccagcactttggaaggttgaggcaggcagatcacctgaggtcaggagttcaagaccagcctggccaacatgatgaaaccccgtctctactgaaaaaaaaaaacaaaattaaccgggcgtggtggcacgtgcctgtagtcccagctgctcaggaggctgaggcaggagaatcgcttgaacccgggagacagaggtcacagtgagccaagatcgcagccactgcactccagcctgggtgacaagagtgaaacttcgtctcaaaaaaaaaaaacaacaacagaaatggccgggcgctgtggctcatgcctgtaatcccatcactttgggaggccgaggtgggtggatcacctgaggtcaggagtttgagaccagcctggccaacatggtgaaaccccgtctctactaaaaatacaaaattagccgggcgcggtggcgggtgcctatgatctcagttactcaggaggctgaggcagaagaatcgcttcaacccgggaggcggaggttgcagtgagctgagatggccccactgcactccagcctgggcgacagagtgagacttcgtctcaatcaatcaatcgatgagagagaatgacagtgtccaccccgactccaagcgcgcagtgctggagaggtggcccctgaggcctgggagttccaaattttggggccgcctctgccagattctggctaaatctgggcaactctagcagggcgctcagtcacgcggggaaattatagttgctggcgggacacgacatgaggatgccagaaataagctcataataatcaagacaaataataaaaacgtcccgcaatttaggtctcggaaaatgaacacaggcagaagatttcgacaacaaatacatcgaggaaccacgaaaggcgccctcggcgtggagcgggcaggagggagacgcgcggagcgaggtagggccctgcccggccccgccgcgtccctcctgtaagtggtcccagggtgtagcgatggggcccagccccagcccagcccgcccgctttccactaggccctatcctgctcaaggccctgtcctcaggttcgcggcctccgttttctcgtcagaggccccaggcgacgccaggaggtaagatttacctcactggtcaagggcagcctctggcctggacacctgcgatagacagacgcctcccctgctcacacctgaaacacaccgcaatggccgaggaccagttactggtcgtcgacaggcgtcctccacaactcctccacaagcgcgcttcacctgaggtggccccttctccgcgacgcttctgaggcaagctgggattcgcacaggagaaaagccagtcccgcctcatccggacacgtcgctgattggctggacgcagagcgcaggcgtgaactgggtggcgagctccgcccccatggggcgattgcgcgcccaaatagctggcccagggtgctttggccgccggagcgggttgcgagtacacttgaggcctggtgccttccagtttttaagttttaaatgtttataatcgaaaattgcagctaggcgcagtggctcacacctgtaatcccagcactttgggaggccgaggcagacggatcacttgaggtcaggagttccagaccagcctgtccaacatggcgaaacccatctctactaaaaaaaaaaaaaaa

SEQ ID NO: 86 - DNA, 544 bp, Homo sapiens
  SITE (176): n equals a,t,g, or c
  SITE (177): n equals a,t,g, or c
  SITE (190): n equals a,t,g, or c
  SITE (500): n equals a,t,g, or c
  SITE (522): n equals a,t,g, or c
acattggcgtcaacaaagacagcctaatgcctctctggtggaatggatcagaacctctgtgggtcactctgaccaaggccaaaaggaaggtctacatgtactactggccaggctgtgaggttgagattctgggtgtcagacccacctactgcctagaatataaaaatgtcccaacnngatatcaattttnccaatgcagtcagcgatgctcttgactccttcamgagtgccgggccgacctggcagccatataccatgagcgcattgacgtggaaggccaccactacgggcctgcatctccgcagaggaaagatgccctcaaggctgtagacactgtcctgaagtacatgaccaagtggatccaggagcggggcctgcaggaccgcctgaacgtcattattttctcggatcacggaatgaccgacattttctggatggacaaagtgattgagctgaataagtacatcagcctgaatgacctgcagcaagtgaaggaccgngggcctgttatatataacaaantgagcacagtggaacacatgga

SEQ ID NO: 87 - DNA, 328 bp, Homo sapiens
  SITE (279): n equals a,t,g, or c
  SITE (319): n equals a,t,g, or c
ggaagaacagggcggggcctgaggcagagaagaggcttcgcagagggccggaggaggacggtccctgggggccctgggaccgccgaggggcccgcagccagggcaaaggtcgccgggcccggcccacctcccctgagctcgagtcttcggatgactcctacgtgtccgctggagaagagcccctagaggcccctgtgtttgagatccccctgcagaatgtggtggtggcaccaggggcagatgtgctgctcaagtgtatcatcactgccaaccccccgncccaagtgtcctggcacaaggatgggtcagcgctgcgcancgagggccg

SEQ ID NO: 88 - DNA, 743 bp, Homo sapiens
gtttccagaccagctttcatgtgagatagcggtgattttcccgctctggtcggcaccgatacgcaagtgctgaagggtggcggggcggtgcgtggtgttattgggaatagaggggcgggggagcatcactttaaccggacgtttcaccgctcgggcggcgagggccgccagcagcgcatcgcttctcaggaacagcttgccgccaaaccctccgccgatatacggggagataatacgcacattctccacgggaactttcagcgtttttgccagatcggtgcggcaccagtcaatcatctgatttgaggtccagagggtaagcttatttccatcccagacggccatcgaggccaataccaccatcggtattccgggcacctttagcgcccgtttgcagccaaatgacacccgtgacgacgtgcaaagtatcgccgcgcaaatctacgaagggctttccttcggggtgggcgatgcggtgatcggcgttaacccggtgactgacgacgtggaaaacttaagccgcgtgttggataccatctatggcgtgatcgacaaattcaacatcccaactcagggctgtgtactggcgcacgtcaccacccagatcgaagcgatccgtcgtggcgcaccgggcgggctgattttccagagtatctgtggcagcgaaaaagggctgaaagagtttggcgtggagctggcgatgctcgacgaagcgcgcgcagtgggcgcggagttcaaccgta

SEQ ID NO: 89 - DNA, 1238 bp, Homo sapiens
ccacgcgtccgctatcttctattctcattcacttccagagaagtgtccttacccgaatgcaggtggacaagtagttaaacacagtggctttgagtgtgaaggcttctcctcgcaccacagaataaggaagggtgagttctaggaagaaaggctggaaggcttgaagagacacgataggagagaggccaaaccctgtggttccagacaagcagaatgcgctggccttccactctgtgatggtttcagggacctggtcaccagctcacttatacctaatgagctagtgaaggagcagagaagaggagtataagcaaatctttttttttttttttttaacacaaagcatggctgatcctagaacatgataactcagtaacctagtgtggtaaatgctaaacttgatctaagggttggtgctcctggtgaggtttaaagttttttttctccctacctcccttactccctccttccctccctccctttatttcttcctcttttctttcattctttccttccttttgttctttctttcaatctccctcccctccccttccctttcctttatttaagagggctggtagcatcctactttctactattttagttatcaatagactaaattagaaaaaaaattagcattgtttaattatgagataaatgaactataaacctaaatatttaccagaaaagagcagagcagaactaaaaggatcaggaatccaggataacatcagtcatacagcaggattcaaaccctctcctaaactaaattccaggcaacacacaacttactcaactaccaccaaatcccagatccaggtctcagggaagtacttccggactatctctttcacttgcaatatctgaggttcttcttcgatcattgggtacattatttctacggctcctgggggtacacctcgcagacctggtcctggaagacaacacacaggcctcagtgtgaacctcatttttatcatcaatttcttattgctgccttatttctcaaatggaataaggtcatacgctcagggaatgtttattattggaacaatttaacctaccagcttgttattttgttcactttcctataaaaaggctaatcctattttttctttaaatagaatctagagctaaatatatttttctttataaataaaaacaaatgacctgtacatgtacctcctgaatctaaaataaaagttgattaaaaaaaaacaaaaaaaaaaaaaaaaaaa

SEQ ID NO: 90 - DNA, 2667 bp, Homo sapiens
gaattggcacgaggtgctttctctgggcttgacaaactgaggcgactgatactccaaggaaatcggatccgttctattactaaaaaagccttcactggtttggatgcattggagcatctagacctgagtgacaacgcaatcatgtctttacaaggcaatgcattttcacaaatgaagaaactgcaacaattgcatttaaatacatcaagccttttgtgcgattgccagctaaaatggctcccacagtgggtggcggaaaacaactttcagagctttgtaaatgccagttgtgcccatcctcagctgctaaaaggaagaagcatttttgctgttagcccagatggctttgtgtgtgatgattttcccaaaccccagatcacggttcagccagaaacacagtcggcaataaaaggttccaatttgagtttcatctgctcagctgccagcagcagtgattccccaatgactttgggttggaaaaaagacaatgaactactgcatgatgctgaaatggaaaattatgcacacctccgggcccaaggtggcgaggtgatggagtataccaccatccttcggctgcgcgaggtggaatttgccagtgaggggaaatatcagtgtgtcatctccaatcactttggttcatcctactctgtcaaagccaagcttacagtaaatatgcttccctcattcaccaagacccccatggatctcaccatccgagctggggccatggcacgcttggagtgtgctgctgtggggcacccagccccccagatagcctggcagaaggatgggggcacagacttcccagctgcacgggagagacgcatgcatgtgatgcccgaggatgacgtgttctttatcgtggatgtgaagatagaggacattggggtatacagctgcacagctcagaacagtgcaggaagtatttcagcaaatgcaactctgactgtcctagaaacaccatcatttttgcggccactgttggaccgaactgtaaccaagggagaaacagccgtcctacagtgcattgctggaggaagccctccccctaaactgaactggaccaaagatgatagcccattggtggtaaccgagaggcacttttttgcagcaggcaatcagcttctgattattgtggactcagatgtcagtgatgctgggaaatacacatgtgagatgtctaacacccttggcactgagagaggaaacgtgcgcctcagtgtgatccccactccaacctgcgactcccctcagatgacagccccatcgttagacgatgacggatgggccactgtgggtgtcgtgatcatagccgtggtttgctgtgtggtgggcacgtcactcgtgtgggtggtcatcatataccacacaaggcggaggaatgaagattgcagcattaccaacacagatgagaccaacttgccagcagatattcctagttatttgtcatctcagggaacgttagctgacaggcaggatgggtacgtgtcttcagaaagtggaagccaccaccagtttgtcacatcttcaggtgctggatttttcttaccacaacatgacagtagtgggacctgccatattgacaatagcagtgaagctgatgtggaagctgccacagatctgttcctttgtccgtttttgggatccacaggccctatgtatttgaagggaaatgtgtatggctcagatccttttgaaacatatcatacaggttgcagtcctgacccaagaacagttttaatggaccactatgagcccagttacataaagaaaaaggagtgctacccatgttctcatccttcagaagaatcctgcgaacggagcttcagtaatatatcgtggccttcacatgtgaggaagctacttaacactagttactctcacaatgaaggacctggaatgaaaaatctgtgtctaaacaagtcctctttagattttagtgcaaatccagagccagcgtcggttgcctcgagtaattctttcatgggtacctttggaaaagctctcaggagacctcacctagatgcctattcaagctttggacagccatcagattgtcagccaagagccttttatttgaaagctcattcttccccagacttggactctgggtcagaggaagatgggaaagaaaggacagattttcaggaagaaaatcacatttgtacctttaaacagactttagaaaactacaggactccaaattttcagtcttatgacttggacacatagactgaatgagaccaaaggaaaagcttaacatactacctcaagtgaacttttatttaaaagagagagaatcttatgttttttaaatggagttatgaattttaaaaggataaaaatgctttatttatacagatgaaccaaaattacaaaaagttatgaaaatttttatactgggaatgatgctcatataagaatacctttttaaactattttttaactttgttttatgcaaaaaagtatcttacgtaaattaatgatataaatcatgattattttatgtatttttataatgccagatttctttttatggaaaatgagttactaaagcattttaaataatacctgccttgtaccattttttaaatagaagttacttcattatattttgcacattatatttaataaaatgtgtcaatttgatgccaaaaaaaaaaa

SEQ ID NO: 91 - DNA, 2211 bp, Homo sapiens
ggttcctgagcgagtggacccggcagcgggcgataggggggccaggtgcctccacagtcagccatggcagcgctgcgctacgcggggctggacgacacggacagtgaggacgagctgcctccgggctgggaggagagaaccaccaaggacggctgggtttactacgccaatcacaccgaggagaagactcagtgggaacatccaaaaactggaaaaagaaaacgagtggcaggagatttgccatacggatgggaacaagaaactgatgagaacggacaagtgttttttgttgaccatataaataaaagaaccacctacttggacccaagactggcgtttactgtggatgataatccgaccaagccaaccacccggcaaagatacgacggcagcaccactgccatggaaattctccagggccgggatttcactggcaaagtggttgtggtcactggagctaattcaggaatagggttcgaaaccgccaagtcttttgccctccatggygcacatgtgatcttggcctgcagsaacatgscaagggcgagtgaagcagtgtcacgcattttagaagaatggcataaagccaaggtagaaacaatgaccctggacctcgctctgctccgtagcgtgcagcattttgctgaagcattcaaggccaagaatgtgcctcttcatgtgcttgtgtgcaacgcagcaacttttgctctaccctggagtctcaccaaagatggcctggagaccacctttcaagtgaatcatctggggcacttctaccttgtccagctcctccaggatgttttgtgccgctcagctcctgcccgtgtcattgtggtctcctcagagtcccatcgatttacagatattaacgactccttgggaaaactggacttcagtcgcctctctccaacaaaaaacgactattgggcgatgctggcttataacaggtccaagytctgcaacatcctcttctccaacgagctgcaccgtcgcctctccccacgcggggtcacgtcgaacgcagtgcatcctggaaatatgatgtactccaacattcatcgcagctggtgggtgtacacactgctgtttaccttggcgaggcctttcaccaagtccatgcaacagggagctgccaccaccgtgtactgtgctgctgtcccagaactggagggtctgggagggatgtacttcaacaactgctgccgctgcatgccctcaccagaagctcagagcgaagagacggcccggaccctgtgggcgctcagcgagaggctgatccaagaacggcttggcagccagtccggctaagtggagctcagagcggatgggcacacacacccgccctgtgtgtgtcccctcacgcaagtgccagggctgggccccttccaaatgtccctccaacacagatccgcaagagtaaaggaaataagagcagtcacaacagagtgaaaaatcttaagtaccaatgggaagcagggaattcctggggtaaagtatcacttttctggggctgggctaggcataggtctctttgctttctggtggtggcctgtttgaaagtaaaaacctgsttggygtgtaggttccgtatctccctggagaagcaccagcaattctctttcttttactgttatagaatagcctgaggtcccctcgtcccatccagctaccaccacggccaccactgcagccrggggctggccttctcctacttagggaagaaaaagcaagtgttcactgctccttgctgcattgatccaggagataattgtttcattcatcctgaccaagactgagccagcttagcaactgctggggagacaaatctcagaaccttgtcccagccagtgaggatgacagtgacacccagagggagtagaatacgcagaactaccaggtggcaaagtacttgtcatagactcctttgctaatgctatrcaaaaaattctttagagattataacaaatttttcaaatcattccttagataccttgaaaggcaggaagggaagcgtatatacttaagaatacacaggatattttggggggcagagaataaaacgttagttaatccctttgtctgtcaatcacagtctcagttctcttgctttcacattgtacttaaacctcctgctgtgcctcgcatcctacgcttaataaaagaacatgcttgaatatcaaaaaaaaaaaaaaaaaaaaaaagggcggccgc

SEQ ID NO: 92 - DNA, 533 bp, Homo sapiens
  SITE (5): n equals a,t,g, or c
  SITE (6): n equals a,t,g, or c
  SITE (8): n equals a,t,g, or c
  SITE (22): n equals a,t,g, or c
  SITE (491): n equals a,t,g, or c
gtcanncngccagtcacggtcngaattcccgggtcgacccacgcgtccgggccctggctgagaggcgttaggagtccgggggttcgcccgcggaggccggggagcagccgaccatggagccccagaaaatcatgccaccctcaaagcctcatccacctgtcgtsggcaaagtgactcatcacagcattgaattatactgggatctggaaaagaaagccaaacgccaaggacctcaagagcagtggttcagsttctcgattgaagaagaagaccccaaaatgcacacttatggtatcatttatacgggatatgcaacgaagcatgttgttgaargtctggaaccaaggacgctgtacagatttcgcctgaaggtcaccagcccctctggggagtgtgagtacagcccactcgtctcagtgtctacaaccagagagcccataagtagtgagcacttgcaacgggctgtcagtgtgaatgatgaagatttgctngtccgaatacttcaaaggaggccgtgttaaaggttatgttcc

SEQ ID NO: 93 - DNA, 1609 bp, Homo sapiens
ctcggcggcgccacgcggcccgccggccacgcgccctgggacaaccacgtctccggccacgccctgttcacagagacaccccatgacatgacagcacggacgggcgaggacgtggagatggcctgctccttccgcggcagcggctccccctcctactcgctggagatccagtggtggtatgtacggagccaccgggactggaccgacaagcaggcgtgggcctcgaaccaggtggtcaaggtggtgggcagcaacatctcccacaagctgcgcctgtcccgggtgaagcccacggacgaaggcacctacgagtgccgcgtcatcgacttcagcgacggcaaggcccggcaccacaaggtcaaggcctacctgcgggtgcagccaggggagaactccgtcctgcatctgcccgaagcccctcccggcgcgcccgccccgccgcccccaagccaggcaaggagctgaggaagcgctcggtggaccaggaggcctgcagcctctagactgatgcccctgcccccgcccatccgcccccacgctgtacagagtgcatgaggagctgccggaccaccggggaccgactgcctgcgtccagccgcgccccatccccgaggccgcctgtgggccaccatgtcggccctctttccaccaccccttgctcagcatgtaagccccacccacccctgccctttcagacccctgcggtgacctggctcggagaaggtggccctgggcaccaaggggccaaccgccctgaacactggggcagggaccatgctggggcccggggccacccccttcctgtcaccagcttctgtggagtccagtgttttgctttgcttgcttgtcccccatcctgtcctgagccggggccccccagcctcgcctccctcctcctaccatccctcacttggacctgggggtgtggacagtgacccctccctgaatatggacttgaatcttctgagcagaactagggcctctcccctggtgaagacccagggaacccaggagggcccttctggggcagtggctctgcagggtcactcatggaggcctaggggaacagcgagatgccccaccacctcctggcgagtccttcctgttcagctccctgtgcgaccctccagggatgcaggggatccaggattctctgccctgtcacacggcgagtcagaagggaggggcctttccctcggacccatggccccaggcagagttttgcaccagcaggacccctttgagggccttcaaggctctcccaggagtccccctctgccggccccccaatgccccagctccctcttgggtcctgtgccaagtccgccccagggcctggggctgttgggagccaagggccccctggtactcagttccctcacgattcccgatcacgggcacacctgccccctggttatttgtaaatatttctattggacccaattctcctcggaattggctggcacctctggctgccacagctcagtgatgacgtgggggaggtgggagaggccgagggctttgcctaggggtgggttgccctgtatacatgatccagtctgtgactaccagccaacctgaataaagcggttttaaaaaaaaaaaaaaa

SEQ ID NO: 94 - DNA, 1894 bp, Homo sapiens
tcgacccacgcgtccgcccacgcgtcggggacagaggcgagagccgggaggaagcagctgcttctcttcacatcggtcatcctgggctccctggcgcgagcaggggtgcggtgcactcgtcggaacctaaagtctctgttgctgagaacagccccgccaagctgctctgctcctactccggcttctcctctccccgcgtggagtggaagtttgcccagggtgacatcaccagcctcgtctgctataacaacaagatcacagcttcctatgaggaccgagttaccttctcgcatagtggcatcactttccattctgtgacccggaaagactcgggcatgtacacgtgtatggtctccgacgaaggcggcaacacctacggggaggtcaccgtcaggctcattgtgcttgtgcctccatccaagcctactgtcagcatcccctcctctgccaccattgggagtcgggcatgtgctgacctgctcggagaaagacggctctcccccttctgagttctactggtacaaggacggggtcatgatgcccacagagcccaagagcaaccgagccttcagcaactcttcctatagcctgaatcacaagaccggggagctggtcttcaaccccgtgtcggcctctgacaccggcgagtacatgtgtcaggcacagaacggctacgggacccccatgtggtcagacgctgtgcgcatggaggccgcggagttgaatgtggggggcatcgtggcggctgtcctcgtgacgctcattctccttggattcttgattttgggcatctggttcgcctatagacgaggctactttgacagaacaaagaaagggacctcgagtaagaaggcgatttacaagccaagcccaagtgcccgccagtgaaggggagttcaggcagacttcgtcattcctggtgtgaccctggtccagctcacctcctgtcctctgtgcttgccttacgctggtgctaccagactctggcccatgatatctgtactttcacagaatgccttacatgtcttctagccccacaagggtccccacttttttcttagttaggatgtgtttttttgttttgttttgtttttaataatgttggctgtgccccccttccttctgccccctcccgtctgttcccaccactgctgagtggtctgggacttgtttaaagctttcgttccccatccctttgaggggtcaggcaggagtcctgattgatactcgttgccctccctccaagcaggcggcaacagtggcaggcactctctacccacccaccccaaccccgtgtcccggcctggagtagtgaccttgagtttatcccgcggccctttcctcccgctgaggaggtatctgcggttccagggtggagactggagaccgagcagcggacagctgacaggttgtttggggaccgcacccagtctctcctgcctctgcagccccctttgttgtcttcccacgggaagtgccgctgggatcctcttgcactgtcctggacacaagcagaccggcaccagctgtgtcttcgggaaataaacaggacctttggttctgtgtggagagcacagcgagctttcaggggacacggagcagaagcgctttaaaaccacggagagaaaaggaagctggagctggaagctcagactgtcgccgttggctgcagcagctgggcggacgctgttgggatacgtccgcagggcggtgggaatgtgtgcaggagctcttagcgctttgcggagcgcgtgtgtgcctgcgtgcgtggtctcagttgctgaaatccagtgtgtgccggagggcttcttggctcttcggtgagattttgttggtgtgtgtttggatgttgctggaaataaaaccttggtttatcaaaaaaaaaaaaaaaaaa

SEQ ID NO: 95 - DNA, 592 bp, Homo sapiens
gcttctttgggggtgaagagattggggaggaagtctccacccctgggaggcagaagccaggcatagcgcgctggctaggactccagtaccgtgaagggaggcagtgagagcagacatctgtgcctcattcctgatctcaaggggaaagcaagaacaaggatctcgaacctgcggaaggaggaccagtctgtgtacttctgccaagtccagctggacatacagatcagggaggctgtcgtggcagtccatcaaggggacccacctcaccatcacccaggccctcaggcagcccctccacagggcccctctcctgcctggacagctctgctggtctccccgtcccctggagaagaacaaggccatgggtcggcccctgctgctgcccctgctgctcctgctgcagccgccagcatttctgcagcctggtgagtacccaggaccgcccaggtatggtctctgcccaaaccacaggaggggccaacccaagacaaaggcagaaaggaaagaccaagatcataaatattaatggtgaaaacactgtagtaataaattttcatatgccaaaaaaaaaaaaaaaaaaaaaaaaaaaaaa

SEQ ID NO: 96 - DNA, 664 bp, Homo sapiens
gcattcactcgctcttttcattcacgaaggtagtgaggcctagtggaaagccatggagagcgctctccccgccgccggcttcctgtactgggtcggcgcgggcaccgtggcctacctagccctgcgtatttcgtactcgctcttcacggccctccgggtctggggagtggggaatgaggcgggggtcggcccggggctcggagaatgggcagttgtcacaggtagtactgatggaattggaaaatcatatgcagaagagttagcaaagcatggaatgaaggttgtccttatcagcagatcaaaggataaacttgaccaggtttccagtgaaataaaaaaattcaaagtggagacaagaaccattgctgttgactttgcatcagaagatatttatgataaaattaaamcaggcttggctggtcttgaaatcggcatcttaggttgggctggcttaaagccccagccctctagtcacagagttggtctttctggtgtccaaccccatcctgggtcatcttgattccactactgagtatatatcaaaaacgaagaaactcaatatattgaagagatatctgcactctatgtttattgcagcactattcacagtagccaaaatatggaatcagcctaacagtctatcagcagatgaatgaaaaaaaaa

SEQ ID NO: 97 - DNA, 923 bp, Homo sapiens
  SITE (633): n equals a,t,g, or c
  SITE (834): n equals a,t,g, or c
  SITE (875): n equals a,t,g, or c
  SITE (901): n equals a,t,g, or c
ggccgacgccgctgcgctgcaagctgggaatgtgaggaagaaattctgccccactgtaacttgcaggtttttacctacacctgtgacgtggggaagagggagaacgtctacctgacggctgaaagagtccgcaagaggttggcgaagtctcagtcctggtcaataatgctggtgtggtctctgggcatcaccttctggaatgtcctgatgagctcattgagagaaccatgatggtcaattgccatgcacacttctggaccactaaggcttttcttcctacgatgctggagattaatcatggtcatattgtgacagttgcagttccttgggattgttcagtactgccggagttgaggattactgtgccagtaaatttggagttgtgggttttcatgaatccctgagccatgaactaaaggctgctgaaaaggrtggawttaaaacaaccytggttkgcccttatcttgtagacactggcatgttcagaggctgccgaatcaggaaagaaattgagccttttctgycacctctgaagcctgattactgtgtgaagcaggccatgaaggccatcctcactgaccagcccatgatctgcactccccgcctcatgtacatcgtgaccttcatgaagangtaactgggaggggttccctcactgactgggtctctccatgcctgcccgatgtcttaattgaaacttcaagtttgctaacagctgtgacttccctttttcagcatcctaccatttgaagcagttgtgtgcatgtatcggttcctaggagcggacaagtgtatgtacccctttattgctcaaagaaagcaagccacaaacantaatgaagcaaaaaatgggatctaagatcttttggatgganaatacttctatcagaaggtgatcagngtttcagtccagtgcactcagc

SEQ ID NO: 98 - DNA, 427 bp, Homo sapiens
ggagctgttcctcgcgggccgccgggtgctggtcaccggggcaggcaaagtgcccggggatagaacccgtgtgcgtggacctgggtgactgggaggccaccgagcgggcgctgggcagcgtgggccccgtggacctgctggtgaacaacgccgctgtcgccctgctgcagcccttcctggaggtcaccaaggaggcctttgacagatcctttgaggtgaacctgcgtgcggtcatccaggtgtcacagattgtggccaggggttaatagcccggggagtcccaggggccatcgtgaatgtctccagccagtgctcccagcggcagtaactaaccatagcgtctactgctccaccaagggtgccctggacatgctgaccaaggtgatggccctagagctcgggccccacaagatccgagtgaatgcag

SEQ ID NO: 99 - DNA, 351 bp, Homo sapiens
  SITE (15): n equals a,t,g, or c
  SITE (323): n equals a,t,g, or c
cggaaactgattgantgcaaagctgaaggcatccccaccccgagggtgttatgggcttttcccgagggtgtggttctgccagctccatactatggaaaccggrtcactgtccatggcaacggttccctggacatcaggagtttgaggaagagcgactccgtccagctggtatgcatggcacgcaacgagggaggggaggccaggttgatcctgcagctcactgtcctggagcccatggagaaacccatcttccacgacccgatcagcgagaagatcacggccatggcgggccacamcatcagcctcaactgctctgccgcggngaccccgacaaccaggctggtgtggggt

SEQ ID NO: 100 - DNA, 3129 bp, Homo sapiens
ggggacccgaaggcagctctcccaggctgcatgtggctgtggcccccaacacactgcgtctggagatccacggggctatgctggaggatgagggtgtctatatctgtgaggcctccaacaccctgggccaggcctcggcctcagctgacttcgacgctcaagctgtgaatgtgcaggtgtggcccggggctaccgtgcgggaggggcagctggtgaacctgacctgccttgtgtggaccactcacccggcccagctcacctacacatggtaccaggatgggcagcagcgcctggatgcccactccatccccctgcccaacgtcacagtcagggatgccacctcctaccgctgcggtgtgggcccccctggtcgggcaccccgcctctccagacctatcaccttggacgtcctctacgcgccccgcaacctgcgcctgacctacctcctggagagccatggcgggcagctggccctggtactgtgcactgtggacagccgcccgcccgcccagctggccctcagccacgccggtcgcctcttggcctcctcgacagcagcctctgtccccaacaccctgcgcctggagctgcgagggccacagcccagggatgagggtttctacagctgctctgcccgcagccctctgggccaggccaacacgtccctggagctgcggctggagggtgtgcgggtgatcctggctccggaggctgccgtgcctgaaggtgcccccatcacagtgacctgtgcggaccctgctgcccacgcacccacactctatacttggtaccacaacggtcgttggctgcaggagggtccagctgcctcactctcattcctggtggccacgcgggctcatgcaggcgcctactcttgccaggcccaggatgcccagggcacccgcagctcccgtcctgctgccctgcaagtcctctatgcccctcaggatgctgtcctgtcctccttccgggactccagggccagatccatggctgtgatacagtgcactgtggacagtgagccacctgctgagctggccctatctcatgatggcaaggtgctggccacgagcagcggggtccacagcttggcatcagggacaggccatgtccaggtggcccgaaacgccctacggctgcaggtgcaagatgtgcctgcaggtgatgacacctatgtttgcacagcccaaaacttgctgggctcaatcagcaccatcgggcggttgcaggtagaaggtgcacgcgtggtggcagagcctggcctggacgtgcctgagggcgctgccctgaacctcagctgccgcctcctgggtggccctgggcctgtgggcaactccacctttgcatggttctggaatgaccggcggctgcacgcggagcctgtgcccactctcgccttcacccacgtggctcgtgctcaagctgggatgtaccactgcctggctgagctccccactggggctgctgcctctgctccagtcatgctccgtgtgctctaccctcccaagacgcccaccatgatggtcttcgtggagcctgagggtggcctccggggcatcctggattgccgagtggacagcgagccgctcgccagcctgactctccaccttggcagtcgactggtggcctccagtcagccccagggtgctcctgcagagccacacatccatgtcctggcttcccccaatgccctgagggtggacatcgaggcgctgaggcccagcgaccaaggggaatacatctgttctgcctcaaatgtcctgggctctgcctctacctccacctactttggggtcagagccctgcaccgcctgcatcagttccagcagctgctctgggtcctgggactgctggtgggcctcctgctcctgctgttgggcctgggggcctgctacacctggagctcattgatcctgatgcagccacatgtgagacctcaacctgtgccccacccctgggctgaccgtggtgttgcctgccctccggaggagaaagtggccagaatctgtgatgactccagcctatgaatgtgaatgaggcagtgttgagtcctgcccgcctctacgaaaacagctctgtgacatctgactttttatgacctggccccaagcctcttgcccccccaaaaatgggtggtgagaggtctgcccaggagggtgttgaccctggaggacactgaagagcactgagctgatctcgctctctcttctctggatctcctcccttctctccatttctccctcaaaggaagccctgccctttcacatccttctcctcgaaagtcaccctggactttggttggattgcagcatcctgcatcctcagaggctcaccaaggcattctgtattcaacagagtatcagtcagcctgctctaacaagagaccaaatacagtgacttcaacatgatagaattttatttttctctcccacgctagtctggctgttacgatggtttatgatgttggggctcaggatccttctatcttccttttctctatccctaaaatgatgcctttgattgtgaggctcaccatggccccgctttgtccacatgccctccagccagaagagatgccctattcccaccacaacccccctacccccagggactggggtactaccttactggcccttacaagagtggagggcagacacagatgttgtcagcatccttattcctgctccagatgcatctctgttcatgactgtgtgagctcctgtccttttcctggagaccctgtgtcgggctgttaaagagaatgagttaccaagaaggaatgacgtgcccctgcgaatcagggaccaacaggagagagctcttgagtgggctagtgactccccctgcagcctggtggagatggtgtgaggagcgaagagccctctgctctaggatttgggttgaaaaacagagagagaagtggggagttgccacaggagctaacacgctgggaggcagttgggggccgggtgaactttgtgtagccgaggccgcaccctccctcattccaggctcattcattttcatgctccattgccagactcttgctgggagcccgtccagaatgtcctcccaataaaactccatcctatgacgcaaaaaaaaaaaaaaaaaaaaaaaaaaaaaaaa

SEQ ID NO: 101 - DNA, 1413 bp, Homo sapiens
ggcacgagaagaaattccattcaaatttatctacttaacgtagccattgcagacctcctactcatcttctgcctccctttccgaataatgtatcatattaaccaaaacaagtggacactaggtgtgattctgtgcaaggttgtgggaacactgttttatatgaacatgtacattagcattattttgcttggattcatcagtttggatcgctatataaaaattaatcggtctatacagcaacggaaggcaataacaaccaaacaaagtatttatgtctgttgtatagtatggatgcttgctcttggtggattcctaactatgattattttaacacttaagaaaggagggcataattccacaatgtgtttccattacagagataagcataacgcaaaaggagaagccatttttaacttcattcttgtggtaatgttctggctaattttcttactaataatcctttcatatattaagattgggaagaatctattgaggatttctaaaaggaggtcaaaatttcctaattctggtaaatatgccactacagctcgtaactcctttattgtacttatcatttttactatatgttttgttccctatcatgcctttcgattcatctacatttcttcacagctaaatgtatcatcttgctactggaaagaaattgttcacaaaaccaatgagatcatgctggttctctcatctttcaatagttgcttagatccagtcatgtatttcctgatgtccagtaacattcgcaaaataatgtgccaacttctttttagacgatttcaaggtgaaccaagtaggagtgaaagcacttcagaatttaaaccaggatactccctgcatgatacatctgtggcagtgaaaatacagtctagttctaaaagtacttgaggtaaacatactaaaatgaattatataatgcagcctcttaattctttgaagaactaaaaaattaggaaacaaagttctagcatttacaaaactcagatctcaaagctctgcttgtatttgtgatatttcatttgcttaactgtaaaccatttcaaggtactaacttttaaatctgtatgtaaaatcttttcaaaatacatttttaagctaatactcttaacatagattatgaagttaagtgaaatttatggctctaacagcaaaataattaaagtgccatagtttctcaagtgactaaagtagttattaaaatcaagcacttgatactaatttgaagtgtgtttaaaagtaaatgatttgggaactgacaatgtgtcagaaaatatatgttcatttatcattttaaaatcttgtataatttgccactgtattcatttatgcctaaatctctataacagatgaaaagataattaataaaatcctaattaaaaaatgaaaaaaaaaaaaaaaaaa

SEQ ID NO: 102 - DNA, 1720 bp, Homo sapiens
gattccattgaaagctacatgcgaacctggatgtaagtttggtgagtgcgtgggaccaaacaaatgcagatgctttccaggatacaccgggaaaacctgcagtcaaggatacttgacaatgactggggacaattttggttgtcataactggatgtgggaggtactcccggcatctagtgaatggagcccagggatgccgctaaacatcctgcagtgcacaggacagtccccacaacaaataatgatttgtgtcaacggaagttaagaaaccctggcatgaagaaatcttcaataattcagaaagggtccccagtcctataaggaagttgaacaaagagcagtaaatccaattcagctgcccttggagaatggagtttcagagaagactggacacccactccactctaccactcccagcccttgctgccaagcccagagcctccctgccctgtggcagcctgatcaaagtccacgtacatccattaatggtgacaggcctcagccctcaactcatgtctttcccaaaacactcttccaagaaatgaatgtgaatgagtgtggaatgaaaccccggccatgccaacacagatgtgtgaatacacacggaagctacaagtgcttttgcctcagtggccacatgctcatgccagatgctacgtgtgtgaactctaggacatgtgccatgataaactgtcagtacagctgtgaagacacagaagaagggccacagtgcctgtgtccatcctcaggactccgcctggccccaaatggaagagactgtctagatattgatgaatgtgcctctggtaaagtcatctgtccctacaatcgaagatgtgtgaacacatttggaagctactactgcaaatgtcacattggtttcgaactgcaatatatcagtggacgatatgactgtatagatataaatgaatgtactatggatagccatacgtgcagccaccatgccaattgcttcaatacccaagggtccttcaagtgtaaatgcaagcagggatataaaggcaatggacttcggtgttctggtaagtagcatttggtcatggtgtcttagctattcccaatgaagcattctccccatatctccttcctccctctatttctctcctttctttgtcttcctcgccttctccctctcccttactctcactctgtgtgtgtgtgcagtgtttaactctctgcctcagccttctcttctttgctaattggaccacatctccaatactcactgaagttgtaggcactaaacttaaagaacagcaagggtacttaatatctttctggccatgacatacttcaaatactgaacataacatttaaggacaaaagacactgagcaaatttatctatcaggatagactgagttatgatgcagtaacaagcaaacctaaaataacagtggcttaaamccacaaaggttttttaaccaagtgaatccggacgttttccagaatgcacaaccaaaacaaagtaaggcaaagctgatcttcattaaagtatgattactttatctgtcatcctcaacgctggatccacttgttttaatgtatatagcagagagttccattgttcttgctggtgaattatttaatactttttgttaaaactttaaatttataaaccagacatctaacaataaaatgtcactgctattaataactacagcaacaataaaggtttatttctcactcaaaaaaaaaaa

SEQ ID NO: 103 - DNA, 1313 bp, Homo sapiens
  SITE (253): n equals a,t,g, or c
actcctgtatcaaccatgagttcttctcagcctgtgtcacgaccattgcaacccatacaaccagcaccgcctcttcaaccatctggggtgccaacaagtggaccatctcagaccaccatacacttactacctacagctccaactaccgtgaatgtaacacatcgtccagtaactcaggtgaccacaagactccctgtaccaagagctcctgcaaaccaccaggtggtttatacaactcttcctgcaccaccangctcaggctcccttgcgaggaactgttatgcaggctcctgctgttcggcaggtcaatccccaaaatagtgttacagttcgagtgcctcaaacaaccacatatgttgtaaacaatggactaaccctgggatcaacaggacctcagctcacagtgcatcaccgaccaccacaagtgcatactgagcccccacgccccgtgcacccagcacccttaccagaagctccacaaccacagcgtctgcccccagaagctgccagcacatctctgcctcagaagccacacttgaagttagcacgcgttcagagtcaaaatggcatagtactgtcatggagtgtcctggaggtggatcgaagctgtgccactgttgatagctaccatctctatgcttaccatgaggaacccagtgccactgtgccctcacaatggaaaaagattggggaagtcaaggcacttcccttgcccatggcatgtactctcacccagtttgtatctggtagcaaatactactttgcagtacgagccaaggatatttatggacgttttgggcctttctgtgatcctcagtcaacagatgtgatctcttctacccagagcagttaaaccttggagcctttatattttcctcttttaaaatttccaccttttggtcttgtttttaatcttgtgcatgataccccatgtaaaatccaccttgtgcaagatttcttggacagatgtgtgtatacactacatttgtttataaccagaagcaaaataaactcagcccacaaagctagaatcttttcctggacagtttaggctttggggtttggaaatgtaaatgtgtaccttgctttagttttgaggctggggaatatgtgtgggtgtttatgtgtgtttttccttatgtaggtgttattgcattggagtctcccattttcattctcaaatttacctcttaaagtacgaagtaagtagatcaaaggatttgagatgtgtaactggcatgattctgcttttgaaggatctatagtatcattttagttaagtgggtcaaacagaatcaaaacaaaacccaaag

SEQ ID NO: 104 - DNA, 855 bp, Homo sapiens
  SITE (854): n equals a,t,g, or c
aagcaggtcggcggcggcggcaggagagcggccgggcgtcagctcctcgacccccgtgtcgggytagtccagcgaggcggacgggcggcgtgggcccatggccaggcccggcatggagcggtggcgcgaccggctggcgctggtgacgggggcctcggggggcatcggcgcggccgtggcccgggccctggtccagcagggactgaaggtggtgggctgcgcccgcactgtgggcaacatcgaggagctggctgctgaatgtaagagtgcaggctaccccgggactttgatcccctacagatgtgacctatcaaatgaagaggacatcctctccatgttctcagctatccgttctcagcacagcgstgtagacatctgcatcaacaatgctggcttggcccggcctgacaccctgctctcaggcagcaccagtggttggaaggacatgttcaatgtgaacgtgctggccctcagcatctgcacacgggaagcctaccagtccatgaaggagcggaatgtggacgatgggcacatcattaacatcaatagcatgtctggccaccgagtgttacccctgtctgtgacccacttctatagtgccaccaagtatgccgtcactgcgctgacagagggactgaggcaagagcttcgggaggcccagacccacatccgagccacgtgcatctctccaggtgtggtggagacacaattcgccttcaaactccacgacaaggaccctragaaggcagctgccacctatgagcaaatraagtgtctcaaacccgaggatgtggccgaggctgttatctacgttctcagcacccccgsacacatccagattgggaggacatccnt

SEQ ID NO: 105 - DNA, 562 bp, Homo sapiens
  SITE (263): n equals a,t,g, or c
gcgcgcgacacgtcggaattggcggctgcagccaggggtcctccgacgctgggcttccgtgagcggcgctctgccagatctctggaccggattcgtcccattctcgtcctcatggtggacaagaaactggtggtggttttcggaggcacaggtgcccagggtggctccgtggcccgcacactcctggaagatgggacattcaaggttcgagtggtgacccgaaaccctaggaagaaggcagcaaaggagctgaggctgcaagntgcagaagtagtgcagggagaccaagatgaccaggtcatcatggagctggccctgaatggggcttacgccaccttcatcgtgaccaattactgggagagctgcagccaggagcaggaggtcaagcaggggaagctgctcgctgatctggccaggcgcctgggcctccactatgtggtcttacagcggcctgggagaacatcaagaagctgacggcagggagattggccgccgcgcamtttgacggcaaaggggaggtggaggatatttccgggacattggcgttcccatgaccagttgt

SEQ ID NO: 106 - DNA, 671 bp, Homo sapiens
  SITE (364): n equals a,t,g, or c
  SITE (665): n equals a,t,g, or c
  SITE (666): n equals a,t,g, or c
ctgctcagcacccaggacggagaggagcagagaagcagcagaagcagccaagagctggagccagaccaggaacctgagccagagctggggttgaagctggagcagcagcaaaagcaacagcagctacagaagttggaacgatgctggtcaccttgggactgctcacctccttcttctcgttcctgtatatggtagctccatccatcaggaagttctttgctggtggagtgtgtagaacaaatgtgcagcttcctggcaagtagtggtgatcackggcgccaacacgggcattggcaaggagacggccagagagctcgctagccgaggagcccgagtctatattgcctgcagagatgtactgaanggggagtctgctgccagtgaaatccgagtggatacaaagaactcccaggtgctggtgcggaaattggacctatccgacaccaaatctatccgagcctttgctgagggctttctggcagaggaaaagcagctccatattctgatcaacaatgcgggagtaatgatgtgtccatattccaagacagctgatggctttgaaacccacctgggagtcaaccacctgggccacttcctcctcacctacctgctcctggagcggctaaaggtgtctgcccctgcacgggtggttaatgtgtcctccnnccccc

SEQ ID NO: 107 - DNA, 706 bp, Homo sapiens
ggcttatcgtgaacctggccttggtggacctgggactggcactcactctccccttttgggcagccgagtcggcactggactttcactggcccttcggaggtgccctctgcaagatggttctgacggccactgtcctcaacgtctatgccagcatcttcctcatcacagcgctgagcgttgctcgctactgggtggtggccatggctgcggggccaggcacccacctctcactcttctgggcccgaatagccaccctggcagtgtgggcggcggctgccctggtgacggtgcccacagctgtcttcggggtggagggtgaggtgtgtggtgtgcgcctttgcctgctgcgtttccccagcaggtactggctgggggcctaccagctgcagagggtggtgctggctttcatggtgcccttgggcgtcatcaccaccagctacctgctgctgctggccttcctgcagcggcagcaacggcggcggcaggacagcagggtcgtggcccgctctgtccgcatcctggtggcttccttcttcctctgctggtttcccaaccatgtggtcactctctggggtgtcctggtgaagtttgacctggtgccctggaacagtactttctatactatccagacgtatgtcttccctgtcactacttgcttggcacacagcaatagctgcctgaacccaattgtctacgtcttaagccg

SEQ ID NO: 108 - DNA, 893 bp, Homo sapiens
gaattttacgcatgggcgcgaccgatcagctcagtaaagaggactggcagcagacttttgcggttaacgtcggcggtgcgtttaacctgttccagcaaaccatgaaccagtttcgccgtcagcggggcggggcgattgtcactgtggcgtccgacgccgcgcacacgccgcgtattggcatgagtgcttatggcgcatcgaaagcggcgctgaaaagcctggcgttgagcgtcgggctggaactggcgggtagcggcgtgcgctgtaatgtggtttcgcctggctccaccgacaccgatatgcaacgcacgctgtgggtgagcgatgacgccgaagaacagcgtattcgcggctttggcgagcagtttaaactcggcattccgctggggaaaatcgcccgtccacaagagatcgccaacacgattttgttcctcgcctctgacctcgccagccatattaccctacaggatattgtggtcgatggcggctcaacgctgggggcataagcatgatctggaaacgccatttaacgctcgacgaactgaacgccaccagcgataacacaatggtggcgcatctgggaattgtgtatacccgtctgggcgatgatgtgctggaaccgaaatkccggttgatacccgtactcatcagccgttcggtttactacatggcggcgcgtcggcgracgctggcggaaacgctgggatcgatggccggatttatgatgacccgcgacggacaktktktggtargcacagaacttaatgcaacacaccatcgcccggtgtctgagggaaaggtcacgcgcgtctgccagccgctgcatcttggtcggcaaaatcagagctgggaaatcgtcgttttcgatgaacaggggcggcgttgctgcactt

SEQ ID NO: 109 - DNA, 1666 bp, Homo sapiens
gtggcggccgctctagaactagtggatcccctgggatacaactctggcaatggtatcgtgaacaggaataccattttcaaaatcaccatattgcttcaaaaaatcgagatgtgtttccccgaaatcctctatatcttcccaaccttctgcaccagaaataacggcacaaatagtcaacagtagaatatctgacaatttatgcaccactttccaggcttgtctgtaatcgggtgtaatagaaatatgttccatcaattttttaagttccatttgttcaccttatttatgtaaggagtatttgatcatgtataagctatgaaaaacagctttagacaataagtagtatctcaattgttgaacttaaaattcgaattatttagtacaaaaaagtagcgttacgtgatctttccctgcaaatggaacgcaaaataaacacctattccatgagttatataatttttcacaatgattaatttgttttctcaggaagagattttatttctcttcactacgaattagttcatgctgtatctttattaaacattcgtaagactcatttttgttcgggagatgtgctgtcattcgagcataagttggtttctcatctttaaaatattttaccatgattgaattatcaaggactgccaacaactgaactggatcactgctctttttttgatagatacccgctcttatataacttctaaaccgatcgccgagaaacgccgttttttctgctgtatttatcaactcctgcaacgttcctttgatggcatgattttcattaaggcgtagtgacccgacgcgaattaagagtctcgccccgcttggtgtgaatttattatttttacatgtacccagttctgtttgccaataatactcaccgatgtcctcattctgataccatctccacatggctttattatttaagacaggaaacgcggaaaaaatagtacccttagcgaaaatagtaaaacaatcatgatctttagcttgtatttcgcaatcagctataacaccaaaactaacaaatatcatcagcaaaaagaacaaaactcttttcattttcttattcctctcgatgttctctgtttcatcttagctaaaatttcacccaaatcatctatccctgctgttgctggcccatcgggtttattaatgtctgggaataaatagggttctgcacaagtatatcctggtggtaattgagttgttggccaatttgtctgtggcaggtaatcacttgctgtctttgtatccatccctggatactgggaatcatcctgtggcgtacaagtcagatttggttttacccacttcctgcaatacagtgtgtagtcgtaagggcttaatgctctgaagaatgttttgaaaacattaggcgcactactggcctggtcaataggatatggcagtcttaattgtttcgctatgtccggcaatttacttggatcgggcgtaggcggtttgttgggtctcgctccatatccgccattatttaagtgtccatattttgatgccagtcccattgaatctatatactgaaccggattcagcggatactgataaaaattccatccccccttcagcccaatcggatcctgagtgatatacctcccctgcagcgggtcataatagcggtggcgcccggtacccaattcgccct

SEQ ID NO: 110 - DNA, 878 bp, Homo sapiens
gcccgaagttaagtggtataaagaatatatgtgtattgagccagataatattaaatacgtgattagcgaggagaagggaagtcacactcttaaaattcgaaatgtctgtctttctgatagtgcaacatacaggtgcagagctgtgaattgtgtaggagaggctatctgtcggggattcctcaccatgggagattctgaaatatttgctgtgatagcaaagaaaagcaaagtgactttaagcagtttaatggaagaattggtcttaaagagcaactacacagacagtttttttgaatttcaggtggtggaagggcctcccaggtttatcaaaggtatttctgactgttatgcaccaataggtacagcagcatattttcagtgcttagttcgtggctctccaagacccacggtttactggtacaaagatggaaaattagtccaaggaagaaggttcactgttgaggaaagtggcacagggttccataacctgtttataacaagcttagtaaagagtgatgaaggagagtataggtgtgtagctacaaacaaatcaggaatggctgagagctttgcagcactcaccttaacttaaaatgtaatgttttagtgcctcagtaattattagcattgatctgagtgctttcatattttccaaattatgtggatctaataaacttccaaacaggtccaccatatttgaattcattaccttggagacccctaaagaaataatctctatgtagaaatctcatctttgtaatacatgtaaatattttgttatctgaactgtggaatcatcacttgtgtcaatcatgctgtgtaatatcaaacacaattaaatctctccttggctaaaaaaaaaaaaaaaaaaaaaaaaa

SEQ ID NO: 111 - DNA, 1808 bp, Homo sapiens
ccacgcgtccggattcggatgttcccgatgacaatagtgatgatttggaagttcctgtgccagcagaagatttgtgtaatgaaggccaaattgcttcagatgaagaagagctggttgaggctgctgctgctgtctcccagcatgattcatctgatgatgctggtgagcaggatcttggtgagaatctcagcaaaccaccaagtgatcctgaggctaaccctgaagtttcagagagaaagctgccaactgaggaagagcctgcacctgtggtggaacaatcagggaaaaggaagtcaaaaaccaaaactattgtggagccaccgaggaaaaggcagacaaagaccaaaaatatagtggagccaccaaggaaaaggcagacaaagaccaaaaatatagtggagccactgaggaagaggaaggcgaaaaccaaaaatgtatctgtgacacctggacataagaagcgtgggccttcaaagaagaaacccggtgcagcaaaagttgaaaaacgcaagactaggactcctaaatgcaaagtccctggatgtttcttgcaagaccttgaaaagtcaaagaaatactctggaaaaaatttaaagcgaaataaggatgaattggttcagagaatctacgacctgtttaacagatccgtctgtgataaaaagctgccagagaaactacgcataggctggaataacaagatggtgaaaactgctggcttatgcagcactggtgagatgtggtacccaaagtggcggcgctttgccaagatccagattggcttgaaagtctgcgactctgcagaccgaatccgggataccttgatccatgaaatgtgccatgctgcctcctggctgattgatggtatccatgattctcatggtgacgcatggaagtattatgccaggaaatccaacaggatacacccggagctgcccagggtcacccgttgccataactataagattaactacaaggtccattatgaatgtactggatgcaaaacgaggattggctgctacaccaaatcgttggacaccagccgcttcatctgtgccaaatgcaaggggtctctggtcatggtgccattaactcagaaagatgggacccgtattgtgccccacgtgtgaccatttgctgtgtatgtgcagaagtattatagaaaaattatgcaggagatggctaggattagccttggggatgtgatgaaaacacttggcaggaattacaaggcaatgaagaattcttaaggttatcttagagtatattaatgtgagctatatcctttactggtaagaagttttagaaaagtttgttttgtgaagttaggaatattagaatttaggtactgttaagtaagtaatgttagaatttaagattcatgttattaacgatgattgaccttaaatagggactctattgctaaccattctgtgcccttgacagggtatttctgaagcccttgggatctaccttgggtcttacttgagttccatatttttcacatgtagaacaaaatgcaaaagaaaagtgagttttcaagagtggcaggttgagagaggagaatgctggaaagaggacaagtttgagaggcaacacttaaacactagggctactgtggcatctatgtagacaggaaagacaaacgtgtttcataaaattcgttgttgatggtattgattgaaactatctgagccatgtaatcaaaaaataaaagttttctgcatcttgaaaaaaaaaaaaaaaaaaaaaaaaaaaaaaaaaaaaaaaaaaaaaaaaaaaaaaaaaaaaaaaaaaaaaaaaaaaaaaaa

SEQ ID NO: 112 - DNA, 1429 bp, Homo sapiens
ccacgcgtccgacctcatccaaaccctctgatttccttaacttggctaagaaaaagaggaagttctccgagtgactcaccactgtggttctactatgccttctgaccccgtcttggacttcaactgggagaatgtggagccatttgaacaggctcctcttctggagcatattttcttctgtcacttgtagaaaagctgtattggattgtgaggcaatgaaaacaaatgaattcccttctccatgtttggactcaaagactaaggtggttatgaagggtcaaaatgtatctatgttttgttcccataagaacaaatcactgcagatcacctattcattgtttcgacgtaagacacacctgggaacccaggatggaaaaggtgaacctgcgatttttaacctaagcatcacagaagcccatgaatcaggcccctacaaatgcaaagcccaagttaccagctgttcaaaatacagtcgtgacttcagcttcacgattgtcgacccggtgacttccccagtgctgaacattatggtcattcaaacagaaacagaccgacatataacattacattgcctctcagtcaatggctcgctgcccatcaattacactttctttgaaaaccatgttgccatatcaccagctatttccaagtatgacagggagcctgctgaatttaacttaaccaagaagaatcctggagaagaggaagagtataggtgtgaagctaaaaacagattgcctaactatgcaacatacagtcaccctgtcaccatgccctcaacaggcggagacagctgtcctttctgtctgaagctactacttccagggttattactgttgctggtggtgataatcctaattctggctttttgggtactgcccaaatacaaaacaagaaaagctatgagaaataatgtgcccagggaccgtggagacacagccatggaagttggaatctatgcaaatatccttgaaaaacaagcaaaggaggaatctgtgccagaagtgggatccaggccgtgtgtttccacagcccaagatgaggccaaacactcccaggagctacagtatgccacccccgtgttccaggaggtggcaccaagagagcaagaagcctgtgattcttataaatctggatatgtctattctgaactcaacttctgaaatttacagaaacaaactacatctcaggggggctgaggcacgagaatcgcttaagtctgggaggcagaggttgcagtgagccaagatcgcaccacggcactccagcctgggcaacagagtgagaccctgtgttaagaaaagaaaagagaaaagaagaaaagaaaagaaaaaggaaaaggaaggaaggaaggaaagagagaaaagaagagaaacaggtgaaatgaattggaataatatattttatttaacccaaaaaaaaaaaaaaa

SEQ ID NO: 113 - DNA, 2026 bp, Homo sapiens
gcaccctgccacccagtgctcacaccctctggccagtgcctggctatggcccgactgctcaggtctgcaacctgggagctgttcccctggaggggctactgctcccagaaggcaaagggagagctctgcagggacttcgtagaggctctgaaggccgtggtgggcggctcccacgtgtccactgccgcggtggtccgagagcagcacgggcgcgatgagtcggtgcacaggtgcgaacctcctgatgctgtggtgtggccccagaacgtggagcaggtcagccggctggcagccctgtgctatcgccaaggtgtgcccatcatcccattcggcaccggcaccgggcttgagggtggcgtctgtgctgtgcaggtacagtggggctccctcgcccggcccgaggatggtcccagcacaccttggcacacctgtggctgcctcccccgccacacacggcaccttgggtctgctcccgcccgtgggctgcctgcctctgggggtctggtctggctgctggggggacacccgcggggtgtggtccggggacgtggccaggtcagagacccaggtctgcagtggtcttagcacctgccccaaccagggcggcgtctgcgttaacctgacgcatatggaccgaatcctggagctgaaccaggaggacttctctgtggtggtggagccaggtgtcacccgcaaagccctcaacgcccacctgcgggacagcggcctctggtttcccacccaggcgcggacgcctctctctgtggcatggcggccaccggggcgtcggggaccaacgcggtccgctacggcaccatgcgggacaacgtgctcaacctggaggtggtgctgcccgacgggcggctgctgcacacggcgggccgaggccggcatttccggaagagtgcagccggctacaacctcacggggctcttcgtgggctccgaggggacgctgggcctcatcacagccaccaccctgcgcctgcaccctgcccctgaggccacagtggccgccacgtgtgcgttccccagtgtccaggctgctgtggacagcactgtacacatcctccaggctgcagtgcccgtagcccgcattgagttcctggatgaagtcatgatggatgcctgcaacaggtacagcaagctgaattgcttagtggcgcccacactcttcctggagttccatggctcccagcaggcactggaggagcagctgcagcgcacagaggagatagtccagcagaacggagcctctgacttctcctgggccaaggaggccgaggagcgcagccggctttggacagcacggcacaatgcctggtacgcagccctggccacgcggccaggctgcaagggctactccacggatgtgtgtgtgcccatctcccggctgccggagatcgtggtgcagaccaaggaggatctgaatgcctcaggactcacaggaagcattgtcgggcatgtgggtgacggcaacttccactgcatcctgctggtcaaccctgatgacgccgaggaactgggcagggtcaaggcttttgcagaacagctgggcaggcgggcactggctctccacggaacgtgcacgggggagcatggcatcggaatgggcaagcggcagctgctgcaggaggaggtgggcgccgtgggcgtggagaccatgcggcagctcaaggccgtgctagacccccaaggcctcatgaatccaggcaaagtgctgtgaagggggtctgagcacttatcccacaagttccctgactacggagccggttctggaacttttcttcatgccacggcccctgcaaggaaatagatgctgaggcagtcttcctgccagcgagcccactgtatctgggcccaaggccagagggcccagagagaagcctgagcaccgtgttacctccctggccctctggctggccccaggagcctttggttcagtaaacgacccagggtggttcccagcaaaaaaaaaaaaaaaaaaaaaaaaaaaaaaaaaaaaaaaaaaaaaaaaaaaaaaaaaa

SEQ ID NO: 114 - DNA, 825 bp, Homo sapiens
  SITE (773): n equals a,t,g, or c
  SITE (815): n equals a,t,g, or c
  SITE (825): n equals a,t,g, or c
cgaatgtccctgagacccagaagggcctgcgctcagctgctctggcaccccgctgcagggatggcctcctgggctaagggcaggagctacctggcgcctggtttgctgcagggccaagtggcatcgtcaccggcggggccacgggcatcggaaaagccatcgtgaaggagctcctggagctggggagtaatgtggtcattgcatcccgtaagttggagagattgaagtctgcggcagatgaactgcaggccaacctacctcccacaaagcaggcacgagtcattcccatacaatgcaacatccggaatgaggaggaggtgaataatttggtcaaatctaccttagatacttttggtaagatcaatttcttggtgaacaatggaggaggccagtttctttcccctgctgaacacatcagttctaagggatggcacgctgtgcttgagaccaacctgacrggtaccttctacatgtgcaaagcagtttacagctcctggatgaaagagcatggaggatctatcgtcaatatcattgtccctactaaagctggatttccattagctgtgcattctggagctgcaagagcaggtgtttacaacctcaccaaatctttagctttggaatgggcctgcagtggaatacggatcaattgtgttgsccctgggarttatttattcccaractgcctgtgggaraactawggtytcctggggacaaactycttgaaggtcttytcagaaaaaccccgctaaaacgaattggtgttccctgangaagtctcctcgtggtctgcttcctactgtctcctgcagctnccttcatcan

SEQ ID NO: 115 - DNA, 939 bp, Homo sapiens
  SITE (919): n equals a,t,g, or c
  SITE (927): n equals a,t,g, or c
gcgccgcgcgggtctggcgggaccggtttggaagactttsccggcctgcagattggccttaagagaaggacggagccacatactgctgacggcccagaactggcagagagaaggttgccatggctgctgttgacagtttctacctcttgtacagggaaatcgccaggtcttgcaattgctatatggaagctctagctttggttggagcctggtatayggccagaaaaagcatcactgtcatctgtgacttttacagcctgatcaggctgcattttatcccccgcctggggagcagagcagacttgatcaagcagtatggaagatgggccgttgtcagcggtgcaacagatgggattggaaaagcctacgctgaagagttagcaagccgaggtctcaatataatcctgattagtcggaacgaggagaagttgcaggttgttgctaaagacatagccgacacgtacaaagtggaaactgatattatagttgcggacttcagcagcggtcgtgagatctaccttccaattcgagaagccctgaaggacaaagacgttggcatcttggtaaataacgtgggtgtgttttatccctacccgcagtatttcactcagctgtccgaggacaagctctgggacatcataaatgtgaacattgccgccgctagtttgatggtccatgttgtgttaccgggaatggtggagagaaagaaaggtgccatcgtcacgatctcttctggctcctgctgcaaacccactcctcagctggctgcattttctgcttctaaggcttatttagaccacttcagcagagccttgcaatatgaatatgcctctaaaggaatctttgtacagagtctaatcccttttctatgtaggccaccagcatgacagcacccagcaactttctgcacaggtgctcntggttggngccttcggccaa

SEQ ID NO: 116 - DNA, 425 bp, Homo sapiens
  SITE (390): n equals a,t,g, or c
  SITE (420): n equals a,t,g, or c
  SITE (424): n equals a,t,g, or c
ggaacgggagatgttgcaggcgccgagagggcgggccagggccgcactccggagactcgcggttgctacgcgcaccatggctggaggctccctggcattgggcagtgttacagtgcactcttctgaacctgaagtcagaattcctgagaataatcctgtgaagttgtcctgtgcctactcgggcttttcttctccccgtgtggagtggaagtttgaccaaggagacaccaccagactcgtttgctataataacaagatcacagcttcctatgaggaccgggtgaccttcttgccaactggtatcaccttcaagtccgtgacacgggaagacactgggacatacacttgtatggtctctgaggaaggcggcaacagctatggggagtccangtcaagctcatcgtgcttgtgcctccatcnaggnt

SEQ ID NO: 117 - DNA, 2277 bp, Homo sapiens
ggcacgagctgaaacctgccaaaattgaccacaagcagtattttagaaagcaagtgctccatgggaaagatttccaagtagattgcaaagcttccggctccccagtgccagagatatcttggagtttgcctgatggaaccatgatcaacaatgcaatgcaagccgatgacagtggccacaggactaggagatatacccttttcaacaatggaactttatacttcaacaaagttggggtagcggaggaaggagattatacttgctatgcccagaacaccctagggaaagatgaaatgaaggtccacttaacagttataacagctgctccccggataaggcagagtaacaaaaccaacaagagaatcaaagctggagacacagctgtccttgactgtgaggtcactggggatcccaaaccaaaaatattttggttgctgccttccaatgacatgatttccttctccattgataggtacacatttcatgccaatgggtctttgaccatcaacaaagtgaaactgctcgattctggagagtacgtatgtgtagcccgaaatcccagtggggatgacaccaaaatgtacaaactggatgtggtctctaaacctccattaatcaatggtctgtatacaaatagaactgttattaaagccacagctgtgagacattccaaaaaacactttgactgcagagctgaagggacaccatctcctgaagtcatgtggatcatgccagacaatattttcctcacagccccatactatggaagcagaatcacagtccataaaaatggaaccttggaaattaggaatgtgaggctttcagattcagccgactttatctgtgtggcccgaaatgaaggtggagagagcgtgttggtagtacagttagaagtactggaaatgctgagaagaccgacatttagaaatccatttaatgaaaaaatagttgcccagctgggaaagtccacagcattgaattgctctgttgatggtaacccaccacctgaaataatctggattttaccaaatggcacacgattttccaatggaccacaaagttatcagtatctgatagcaagcaatggttcttttatcatttctaaaacaactcgggaggatgcaggaaaatatcgctgtgcagctaggaataaagttggctatattgagaaattagtcatattagaaattggccagaagccagttattcttacctatgcaccagggacagtaaaaggcatcagtggagaatctctatcactgcattgtgtgtctgatggaatccctaagccaaatatcaaatggactatgccaagtggttatgtagtagacaggcctcaaattaatgggaaatacatattgcatgacaatggcaccttagtcattaaagaagcaacagcttatgacagaggaaactatatctgtaaggctcaaaatagtgttggtcatacactgattactgttccagtaatgattgtagcctaccctccccgaattacaaatcgtccacccaggagtattgtcaccaggacaggggcagcctttcagctccactgtgtggccttgggagttcccaagccagaaatcacgtgggagatgcctgaccactcccttctctcaacggcaagtaaagagaggacacatggaagtgagcagcttcacttacaaggtaccctagtcattcagaatccccaaacctccgattctgggatatacaaatgcacagcaaagaacccacttggtagtgattatgcagcaacgtatattcaagtaatctgacatgaaataataaagtcaacaacatctgggcagaatttattttttggaagaagtttaatcaaaggcagccataggcatgtaaatgaatttgaatacatttacagtattaaatttacaatgaacatgcaaaataaaaggacttgtaaataaatgcattatgaactgatgatactgatttatttaatggatctcaaaacaaacttttaacttaaggcacttttattttgccaacaaataacaataaacaaacattgaaacggttcactataaaataacaaatggctaatgtacctgaatttttcagtaaaaaaatgaacttctaataccagttgcctagtgtccacctcctatcaatgttacaagcatggcactcagaacagagacaatggaaaatattaaatctgcaatctttatgatgtaaatttaccatcctgatgtataaatattttgtggtttataaatttttttgctaaaacctacagaaaaaaaaaaaaaaaaa

SEQ ID NO: 118 - DNA, 394 bp, Homo sapiens
  SITE (36): n equals a,t,g, or c
ctgccgaccagggctcctacaggtgtatcgtcagcnagtggatcgccgagcagggcaactggcaggaaatccaagaaaaggccgtggaagttgccaccgtggtgatccagccgacagttctgcgagcagctgtgcccaagawtgtgtctgtggctgaaggaaaggaactggacctgacctgtaacatcacaacasaccgagcckatgacgtccggcccgaggtgacgtggtccttcagcaggatgcctgacagcaccctacctggctcccgcgtgttggcgcggcttgaccgtggattccctggtgcacagctcgcctcatgttgctttgagtcatgtggatgcacgctcctaccatttactggttcggggatgttagcaaagaaaactctggg

SEQ ID NO: 119 - DNA, 1608 bp, Homo sapiens
gctcgtgccgctcgtgcsgccgaaatcgtaggacttccgaaagcagcggtggcgtttgcttcactgcttggaagtgtgagtgcgcgaagatgcgaaaggtggttttgatcaccggggctagcagtggcattggcctggccctctgcaagcggctgctggcggaagatgatgagcttcatctgtgtttggcgtgcaggaacatgagcaaggcagaagctgtctgtgctgctctgctggcctctcaccccactgctgaggtcaccattgtccaggtggatgtcagcaacctgcagtcggtcttccgggcctccaaggaacttaagcaaaggtttcagagattagactgtatatatctaaatgctgggatcatgcctaatccacaactaaatatcaaagcacttttctttggcctcttttcaagctgaaggcctgctgacccagggtgataagatcactgctgatggacttcaggaggtgtttgagaccaatgtctttggccattttatcctggtaaagaagctgtgggcttaataagctaatatttcgtgtgatagtttctgtaaagctctgggcacagggcattattatagttgagcagccagttaactgatttaatctcatgtttgagttttcttgattgcatttgccttgtttattgtgagcatggaatacttctggaagctttcctagtagatttttctttaataaatgtactaatagtttttgatttacagaattactgcaaagatagtacagagactttctgtatgccctacacccagtttcccctattattaacatttcgcattggtatgatgcatttgtcraaatagatgaatcaattctgctacattattattaactaaagtacacactttattcaggttctgtttttgcctaawgtsttttttcagttctaggatcccattcaagatactacattacatttagcagtcatgtctccttaggctcttcttggttgtgacagcttctcagactttccttgtttttgatgaccttgacagttttgaggagtactgcttaggtgttttgtagactctctcaatcgggatttgtctgatgtttttctcatggtgagactgaagaatgtggtttttgggaggaaggccacagaggtaaagtgacattctcatgacatcatatcaagggtgtatgctatcagtatgacttctcagtgttgatattaaccttgatcacctggcttgaggtcatgtttgtcaggtttttccattgttaagttactttttctttctcccttttcatactctactttttgaaagaaagttgggccgggcacggtggctcctgcctctaatcccagcactttgggaggccaaggcgggcagattacctgaggtcgggagtttgagatcagcctgaccaacatggagaaaccccatctctatcaaaaaacaaaattagccgagtgtggtgacgcatgcctgtratcscagctgcttgrgaggctgaggcagaagaatcgcttgaacccgggaagcggaagttgtggtgagccgaggtcatgccattggactccagcctgggcaacaacagtgaaactccgtctcaaaaaaaaaaaaaaaagag

SEQ ID NO: 120 - DNA, 1812 bp, Homo sapiens
ccacgcgtccgagatcgcgagctgtgtctgttcccaggagtccttcggcggctgttgtgtcagtggcctgatcgcgatggggacaaaggcgcaagtcgagaggaaactgttgtgcctcttcatattggcgatcctgttgtctgtgaagttgtcctgtgcctactcgggcttttcttctccccgtgtggagtggaagtttgaccaaggagacaccaccagactcgtttgctataataacaagatcacagcttcctatgaggaccgggtgaccttcttgccaactggtatcaccttcaagtccgtgacacgggaagacactgggacatacacttgtatggtctctgaggaaggcggcaacagctatggggaggtcaaggtcaagctcatcgtgcttgtgcctccatccaagcctacagttaacatcccctcctctgccaccattgggaaccgggcagtgctgacatgctcagaacaagatggttccccaccttctgaatacacctggttcaaagatgggatagtgatgcctacgaatcccaaaagcacccgtgccttcagcaactcttcctatgtcctgaatcccacaacaggagagctggtctttgatcccctgtcagcctctgatactggagaatacagctgtgaggcacggaatgggtatgggacacccatgacttcaaatgctgtgcgcatggaagctgtggagcggaatgtgggggtcatcgtggcagccgtccttgtaaccctgattctcctgggaatcttggtttttggcatctggtttgcctatagccgaggccactttgacagaacaaagaaagggacttcgagtaagaaggtgatttacagccagcctagtgcccgaagtgaaggagaattcaaacagacctcgtcattcctggtgtgagcctggtcggctcaccgcctatcatctgcatttgccttactcaggtgctaccggactctggcccctgatgtctgtagtttcacaggatgccttatttgtcttctacaccccacagggccccctacttcttcggatgtgtttttaataatgtcagctatgtgccccatcctccttcatgccctccctccctttcctaccactgctgagtggcctggaacttgtttaaagtgtttattccccatttctttgagggatcaggaaggaatcctgggtatgccattgacttcccttctaagtagacagcaaaaatggcgggggtcgcaggaatctgcactcaactgcccacctggctggcagggatctttgaataggtatcttgagcttggttctgggctctttccttgtgtactgacgaccagggccagctgttctagagcgggaattagaggctagagcggctgaaatggttgtttggtgatgacactggggtccttccatctctggggcccactctcttctgtcttcccatgggaagtgccactgggatccctctgccctgtcctcctgaatacaagctgactgacattgactgtgtctgtggaaaatgggagctcctgttgtggagagcatagtaaattttcagagaacttgaagccaaaaggatttaaaaccgctgctctaaagaaaagaaaactggaggctgggcgcagtggctcacgcctataatcccagaggctgaggcaggcggatcacctgaggtcaggagttcaggatcagcctgaccaacatggagaaaccctactggaaatgcaaagttagccaggcatggtggtgcatgcctgtaatcccagctgctcaggagcctggcaacaagagcaaaactccagctcaaaaaaaaaaaaaaa

SEQ ID NO: 121 - DNA, 1882 bp, Homo sapiens
gggcacctgcacagcaatcaaagccgactcctacatttgcctctgtccccttgggtttaaaggtcgacactgtgaagatgctttcaccttgaccattcctcagttcagagagtctctgagatcttacgctgcaactccctggccactggagccccagcattacctttccttcatggaatttgagatcacatttcggccagactcaggagatggtgtcctcctgtacagctatgacacaggcagcaaagacttcctgtccatcaacttggcagggggccacgtggagttccgctttgactgtggctctgggaccggtgtcctcaggagtgaagatcccctcaccctgggcaactggcacgagcttcgtgtatctcgcacagcaaagaatggaatcttacaggtggataagcagaagatagtggagggaatggcagagggaggcttcacacagattaagtgcaacacagacattttcattggcggagtccccaattatgatgatgtgaagaagaactcgggtgtcctgaagcctttcagcgggagcatccagaagatcatcctgaatgaccgaaccatccatgtgaagcatgacttcacctccggagtgaatgtggagaatgcggcccacccctgtgtgagagccccttgtgcccatgggggcagctgccggcccaggaaggagggctatgactgtgactgccccttgggctttgaggggcttcactgccagaaagcgatcatagaagccattgagatcccgcagtttatcggccgcagttacctgacgtatgacaacccagatatcttgaagagggtgtcaggatcaagatcaaatgtgttcatgaggtttaaaacaactgccaaggatggccttttgctgtggaggggagacagccccatgagacccaacagcgacttcatttccttgggccttcgggatggagccctcgtgttcagctataacctgggcagtggtgtggcatccatcatggtgaatggctccttcaacgatggtcggtggcaccgagttaaggccgttagggatggccagtcaggaaagataaccgtggatgactatggagccagaacaggcaaatccccaggcatgatgcggcagcttaacatcaatggagctctgtatgtgggtggaatgaaggaaattgctctgcacactaacaggcaatatatgagagggctcgtgggctgtatctctcacttcaccctgtccaccgattaccacatttccctcgtggaagatgccgtggatgggaaaaacatcaacacttgtggagccaagtaacaccagctggccttgtccaagggacagagccttctattctgagaatcccaggggccctcagaccctgcctgatgctatatgcagaggcccagggaccaggtgtgtttcctctcaccaagaagaaagtacacactgatgagaaactgagaaccaagacaggcatccctgggtggcctttcctgctgacactccacgagctgacccagcagaattctctgtgtaggaagcatcggactttgtccattgaatatgtagcggctgccagagatcacacatcaatgcaaattccagagcctgtctgctatagctcagtgactgtgttgtgattcatagtacattaaaaagagagagagagagaaagaatcccacagggcactattaaaatacttctctccttccctgactcatgacactcttcctgacagcagaatgactgtgtgaccttgaacttcacatttcccacattggcccttggattgttcggattaaccccttccactcctcactggctggttcactgtgttctgactagtccataaaaataaagatggaaggagatcaaaaaaaaaaaaaaaaaaaaaa

SEQ ID NO: 122 - DNA, 1150 bp, Homo sapiens
ggcacgagacacgaggctgcttcgctgcacacccgagaaagtttcagccaaacttcgggcggctgaggcggcggccgaggagcggcggactccgggcgcggggagtcgaggcatttgcgcctgggcttcggagcgtagcgccagggcctgagcctttgaagcaggaggaggggaggagagagtggggctcctctatcgggaccccctccccatgtggatctgcccaggcggcggcggcggaggaggcgaccgagaagatgcccgcctgcgccccgctctgctgtgggcgctgctggcgctctggctgtgctgcgcgacccccgcgcatgcattgcagtgtcgagatggctatgaaccctgtgtaaatgaaggaatgtgtgttacctaccacaatggcacaggatactgcaaatgtccagaaggcttcttgggggaatattgtcaacatcgagacccctgtgagaagaaccgctgccagaatggtgggacttgtgtggcccaggccatgctggggaaagccacgtgccgatgtgcctcagggtttacaggagaggactgccagtactcgacatctcatccatgctttgtgtctcgaccttgcctgaatggcggcacatgccatatgctcagccgggatacctatgagtgcacctgtcaagtcgggtttacaggtaaggagtgccaatggaccgatgcctgcctgtctcatccctgtgcaaatggaagtacctgtaccactgtggccaaccagttctcctgcaaatgcctcacaggcttcacagggcagaagtgtgagactgatgtcaatgagtgtgacattccaggacactgccagcatggtggcacctgcctcaacctgcctggttcctaccagtgccagtgccttcagggcttcacaggccagtactgtgacagcctgtatgtgccctgtgcaccctcgccttgtgtcaatggaggcacctgtcggcagactggtgacttcacttttgagtgcaactgccttccagaaacagtgagaagaggaacagagctctgggaaagagacagggaagtctggaatggaaaagaacacgatgagaattagacactggaaaatatgtatgtgtggttaataaagtgctttaaactgaaaaaaaaaaaaaaaaaaaaa

SEQ ID NO: 123 - DNA, 616 bp, Homo sapiens
  SITE (1): n equals a,t,g, or c
  SITE (2): n equals a,t,g, or c
  SITE (3): n equals a,t,g, or c
  SITE (7): n equals a,t,g, or c
  SITE (9): n equals a,t,g, or c
nnnaaananatccagcacaagaaaaggacccggagtgattgtggatcctaccactggattgatccctttgaccagtgtacccacatcaccaaaagaaatgaccacaaagcttggcgttacagcagagtacaagcccagcttcacgttccctcggaacatctccttctccccaaaccacagttgtttccacggctgaagacttggctcccaaatctgccacctttgctgttcagagcagcacacagtcaccaacaacactgtcctcttcagcctcagtcaacagctgtgctgtgaacccttgtcttcacaatggcgaatgcgtcgcagacaacaccagccgtggctaccactgcaggtgcccgccttcctggcaaggggatgattgcagtgtggatgtgaatgagtgcctgtcgaacccctgcccatccacagccacgtgcaacaatactcagggatscwttatctgcaaatgcccggttgggtaccagttggaaaaarggatatgcaatttgggtaaragacttartctatttcggactttattccgtaccacaatatattttacaargtaacatttgttattttcttcctaaccaaaatcagtatttgtccaagg

SEQ ID NO: 124 - DNA, 837 bp, Homo sapiens
  SITE (506): n equals a,t,g, or c
  SITE (745): n equals a,t,g, or c
  SITE (837): n equals a,t,g, or c
tggggatcattcccatatagaagaagcagccatggatggtacactgagaaggattttagtacaaaagaacttacagagacccacaggtttggctgtggattattttagtgaacgcatatattgggctgactttgagctctccatcattggcagtgttctgtatgatggctctaattcagtagtctctgtcagcagcaaacaaggtttattacatccacataggatcgatatctttgaagattatatatatggagcaggacctaaaaatggtgtatttcgagttcaaaaatttggccatggttcaagtagagtacttagctttaaatattgataaaacaaaaggtgttttgatatctcatcgttataaacaactaagatttacccaatccatgcttggatttagcatgccgaatttctttgcttgctaaatccttctggggccacttgtgtgtgtccagaaggaaaatatttgattaatggcacctgcaatgatgacagcctgttanatgattcatgkaagttaacttgtgaaaatggaggaagatgcattttaaatgagaaaggtgatttgargtgtcactgktggcccarttattcaggagaaagatgtgaagtcaaccactgtagcaactactgscagaatggaggaacttgcgtaccatcagttctagggagacccacctgcagctgtgcactgggtttcactgggccaaactgtggtaaagacagtctgtgaaggattttntgtcaaaatggaaggaactgcattgtgactgctggaaaccagccttactgccactgccagcggaatacccggaaacagatgtcagtactacn

SEQ ID NO: 125 - DNA, 732 bp, Homo sapiens
  SITE (583): n equals a,t,g, or c
  SITE (608): n equals a,t,g, or c
  SITE (620): n equals a,t,g, or c
  SITE (621): n equals a,t,g, or c
  SITE (673): n equals a,t,g, or c
  SITE (691): n equals a,t,g, or c
  SITE (706): n equals a,t,g, or c
cagctctaatacgactcactatagggaaagctggtacgcctgcaggtaccggtccggaattcccgggtcgacccacgcgtccgcacatgttggttcaaggtctagaaccaaacaccaaatacgaatttgccgttcgattacatgtggatcagctttccagtccttggagccctgtagtctaccattctactcttccagaagcaccagcaggcccaccagttggagtaaaagtgacattaatagaggatgacactgccctggtttcttggaaaccccctgatggcccagaaacagttgtgacccgctatactatcttatatgcatctaggaaggcctggattgcaggagagtggcaggtcttacaccgtgaagggscaataaccatggctttgctagaaaacttggtagcaggaaatgtgtacattgtcaagatatctgcatccaatgaggtgggagaaggacccttttcaaattctgtggagctggcagtacttccaaaggaaacctctgaatcaaatcagagcccaagcgtttagattctgctgatgccaaagtttattcaggatattaccatctggaccanaaatcaatgactggcattgctgtangtgttggcatanncttgacctgcatcctcatctgtgttctcatcttgatatacccgaagtaaagncaggaaatcatctgcttncaagacggcacacantggaactcaacagttaccttgtacca

SEQ ID NO: 126 - DNA, 803 bp, Homo sapiens
agatgtcatagacttaaaaaaaggagtggctcattttgaaaggattggaggagaatctgttggggatttgatgataaggaatattcagttacatcattcaggaatatctctgcacagtacaaacaaccctagaaagtttatctgcagtagccgatatcattgttagaggtccaccaggtcctcctgaggatgtgcaagtggaagacatttccagtactacttctcaactaagttggagagcaggcccagataataacagtcccattcaaatatttactattcagactcggacaccattttctgtgggttggcaggctgttgctacagttccagaaattctcaatggtaagacatacaatgcaacagtggttggtttgagtccttgggtggaatatgaatttcgtgttgttgccggcaacagcattgggattggagaaccaagtgaaccatcagaattgttaagaactaaagcatcagtccctgttgtggcaccagtaaacatccatggaggtggaggaagtcggtctgaactcgtcattacgtgggagtcaattccagaagaactgcagaatggggagggatttggatatatcatcatgttccggccagtgggctcgacaacctggtccaaggagaaagtgtcatctgtggaatcatcaaggtttgtctacagaaatgaaagcatcatcccactgtctccckggtgaagtcaaagtgggtgtgtataataatgaaggagaaggatccctgagtactgtgaccattgtctactctggggaagatgaacctcaactggccccaag

SEQ ID NO: 127 - DNA, 1100 bp, Homo sapiens
  SITE (938): n equals a,t,g, or c
  SITE (1080): n equals a,t,g, or c
atcatcaacgttactaaatcagacgctgggagttatacctgtatagccactaaccattttggaactgctagcagtactggaaacttggtagtgaaagatccaacaagggtaatggtacccccttccagtatggatgtcactgttggagagagtattgttttaccgtgccaggtaacgcatgatcactcgctagacatcgtgtttacttggtcatttaatggacacctgatagactttgacagagatggggaccactttgaaagagttggagggcaggattcagctggtgatttgatgatccgaaacatccaactgaagcatgctgggaaatatgtctgcatggtccaaacaagtgtggacaggctatctgctgctgcagacctgattgtaagaggtcctccaggtcccccagaggctgtgacaatagacgaaatcacagataccactgctcagctctcctggagacccgggcctgacaaccacagccccatcaccatgtatgtcattcaagccaggactccattctccgtgggctggcaagcagtcagtacagtcccagaactcattgatgggaagacattcacagcgaccgtggtgggtttgaacccttgggttgaatatgaattccgcacagttgcagccaacgtgattgggattggggagcccagccgcccctcagagaaacggagaacagaagaagctctccccgaagtcacaccagcgaatgtcagtggtggcggaggcagcaaatctgaactggktataacctgggagacggtccctgaggaattacagaatggtcgaggctttggttatgtggtggccttccggccctacggtaaaatgatctggatgctgacagtgctggcctcarytgacgcctctagatacgtgttcaggaatgagagcgtgcacccttctctcctttgaggttaaantaggtgtcttcaacaacaaaggagaaggcctttcagtcccaccaggtggtgtattctgcagaagaagaacccaccaaaccaccagccatatctttgccagaagtctttctgccacagtattgaagttttctgggcctcccantggagaaggttagaggacgg

SEQ ID NO: 128 - DNA, 253 bp, Homo sapiens
  SITE (250): n equals a,t,g, or c
tttcgaaaaagctatttaggtgacactatagaaggtacgcctgcaggtaccggtccggaattcccgggtcgacccacgcgtccgaagtaataatgaccgcctataacatcatcggcgagagcccagccagcgcgcccgtggaggtctttgtcggcgaggctgccccggccatggccccgcagaacgtgcaggtgaccccactcacggccagccagctggaggtcacgtgggacccaccacccccggagancca

SEQ ID NO: 129 - DNA, 907 bp, Homo sapiens
ctcacttctggagaaattgtttatcttctggagaagatagatacagattggtacagagggaactgtagaaaccagattggcatatttcctgccaactatgtcaaagtgattgtaagtgggttgtgtttgttttaatttggtcatatactcagtgggttctatgtgacttgtaggttggaaaaaataactagaaacccagattctagttctctttcattgattcatttggcatttggaaaattcaaaaataaagatttggtcaactaggtgatggttaattattatattatggagtgttagaacttaatgcctaaatgctgtctgaaatcctaaagtgaaagaccaccacaggtcaactggtgaatcagctgttcttggagagttgttaagcacttaaggatatatggtaattctttgagacatttagtgaacatgaattcagtgatactagcttatcctgtagagatgttctctgaggttatggtaccacttcttttctttggagtacattttggtttgagtttctttcatcttttccattcttatttatctccatctttaaaaaaaaatttatttgggaatacagaagtatttatattggagatagtggttcattaatggttgtacccacaaaataatttctaatctgattaggaaaattatattaaagcaccagaatttttataccctcacggcctaacttgtgaaagcattcctatgtgtgagagctgtgtgtaagcccagatggctgtgtgaaacatggggataaaatcagactgccctcacacatttgtatcaattggaataggatgactcggtccctgatataacttactgatactgtgaaatatcaataaatttagcttaacagcattaacagcttatttggaaaaaaaaaaaaaaaaaa

SEQ ID NO: 130 - DNA, 558 bp, Homo sapiens
  SITE (226): n equals a,t,g, or c
cagattgatgaatttgtccacactgaaagttcttcaacgaagatgcagctagtaaaacagaggcttgaaactgtcacagaggtgatacgttcctgtgctgcaaaagtcaacaaaaatctctcatttacttcaccaccagcagtttcctcacaacagtctaagttaaagcagtcaaacatgctgaccgctcaagagattctacatcagtttggtttcactcagaccnggattatcagcatagagagaaagccttgtaaccatcaggtagatacagcaccaacggtagtggctctttatgactacacagcgaatcgatcagatgaactaaccatccatcgcggagacattatccgagtgtttttcaaagataatgaagactggtggtatggcagcataggaaagggacaggaaggttattttccagctaatcatgtggctagtgaaacaytgtatcmagaactgcctcctgagrtaaaggagcgwtcccctcctttwagccctkaagraaaaactaaawtggaaaaatctccagcttctcaaaaggtacaatataacaca

SEQ ID NO: 131 - DNA, 2339 bp, Homo sapiens
ggcacgaggccctgcgcccgagccgagtgtgacacccgtagagactgcctggccaaactgatctatgcgcggttgtttgactggctggtatcagtgatcaacagcagcatctgtgcagacaccgactcgtggaccactttcataggcctgctggatgtgtatggatttgaatcatttcctgacaacagtctggaacagttgtgcatcaactacgccaatgagaagctgcagcagcattttgtggctcactacctaagggcccagcaggaggaatacgcagttgagggcctggagtggtcattcatcaactaccaggacaaccagccctgtttggatctcattgagggaagccccatcagcatctgctccctcataaatgaggaatgccgcctcaatcgacccagcagcgcagcccagctccagacacgcattgagactgccctggcaggcagcccctgcctgggccacaataagctcagccgggagcccagcttcattgtggtgcattatgcggggcctgtgcggtaccacacagcaggcctggtggagaagaacaaggaccctatcccacctgagctgaccaggctcctgcagcaatcccaggaccccctgctcatggggctgtttcctactaaccccaaagagaagacccaggaggaaccccctggccagagcagggcccctgtgttgaccgtggtgtccaagttcaaggcctcactggagcagcttctgcaggtcctacacagcaccacgccccactacattcgctgcatcaagcccaacagccagggccaggcgcagacctttctccaagaggaggtcctgagccagctggaggcctgtggcctcgtggagaccatccatatcagtgctgctggcttccccatccgggtctctcaccgaaactttgtagaacgatacaagttactaagaaggcttcatccttgcacatcctctggccccgacagcccatatcctgccaaagggctccctgaatggtgtccacacagcgaggaagccacgcttgaacctctcatccaggacattctccacactctgccggtcctaactcaggcagcagccataactggtgactcggctgaggccatgccagcccccatgcactgtggcaggaccaaggtgttcatgactgactctatgctggagcttctggaatgtgggcgtgcccgggtgctggagcagtgtgcccgctgcatccagggtggctggaggcgacaccggcaccgagagcaggagcggcagtggcgggccgtcatgctcatccaggcagccattcgttcctggttaactcggaaacacatccagaggctgcatgcagctgccacagtcatcaagcgtgcatggcagaagtggagaatcagaatggcctgccttgctgctaaagagctggatggtgtggaagaaaaacacttctctcaagctccctgttccctgagcacctcgccgctgcagaccaggctcctggaggcaataatccgcttctggcccctgggactggtcctggccaatacggctatgggtgtaggcagctttcagaggaaattagtggtctgggcttgcctccagctccccaggggcagccccagtagctacactgtccagacagcacaagaccaggctggtgtcacgtccatccgagcgctgcctcagggatcgataaagtttcactgcagaaagtctccactgcggtagctgacatctgccctgaaccttcaccctacagcattacaggctttaatcagattctgctggaaagacacaggctgatccacgtgacctcttctgccttcactgggctggggtgatccttggtgcctttgtttccacaaggccttttcctgccccctgccttgccaaagacatttaatcagcacacagctgccagactattcccacagtgctccaaatgcacatgaacaacagtgacggctccagccttcgacccagagccccgtgcccagtgcgtcagtgggcctggggttccaggctacatcaagcactgatggtgtcagggctggtagttaccaaatcagggttaagaaacatcagggccacatttcactaccttcacagatcaaactcagcagcagtcatgactgtctgtcactacactggggatcccaattccacataagcacttttggaagaaaacagccaaagttggcctaaaattggcgctggaatttgggctgggaaaaatcttgtggttatttcctttaaaaaggaacaaaactttagtatttaattagttgatttatttaatgtaatttcaaacaattaaattatgaataatgcaatgtaaaaaaaaaaaaaaaaaa

SEQ ID NO: 132 - DNA, 1127 bp, Homo sapiens
gcgtccggccaggggaactggacagcgcctcagggcgtcatctactccccggacttcccggacgagtacgggccggaccggaactgcagctgggccctgggcccgccaggcgccgcgctggagctcaccttccgcctcttcgagctggccgacccgcgcgaccggctggagctgcgcgacgcggcttcgggcagcctgctccgcgacttcgatggcgcccgcccaccgccgtccgggccgctgcgcctgggcactgccgcgctgctgctcaccttccgaagcgacgcgcgcggtcacgcgcaaggcttcgcgctcacctaccgcgggctgcaggacgccgctgaggacccagaggcccccgagggctcggcccagacccccgcggcgcccctcgacggggccaacgtgagctgcagccccaggcctggggctccgccggccgcgattggggcccgggtcttctcgacggtgacggctgtctcggtgctgctgctgctgctcctggggctgctgcgtccgctgcgccgacggagctgtctgctggctccgggaaaagggcccccggcgctgggggcttccaggggccccaggagaagctgggctgtgtggtaccaacagccccgaggggtggccttgccctgctcccccggggacccccaggctgagggttctgccgcgggctaccggcctctgagtgcctccagccagagctccctgcgctcgctcatctccgctctctgactctgggccccgagggtccgctgggcccgccgccggcgagatggacacctgagatgctgtgctgcgccctgcctcggccttgcgcctgtgtaggggcagctcggcctctggtcgccttggggagaccaaaagtcggacaggaaacatctggtgctattatctgggacttggcctgaccgtgggggtccagatggtccaggccctctccatggacctgtatgtgggggtggtctctggtttcggaggtctttgaacccctctgggggtggtcctggactgccgtcctcagtgagaggtcacaggtcagcaaaaacagtcaaaaaacccccacagattttgaataaaggatctactttggtaaaaaaaaaaaaaaaaaaaaaaaaaaa

SEQ ID NO: 133 - DNA, 1024 bp, Homo sapiens
caggtctctagccttcctggcaacgcccccgaggccggacttccaggatccagcctctattgaggatttgatgcgacggcctcacggggctttggaggtgaaagaggcccagagtagagagagagagagaccgacgtacacgggatggctacgggaacgcgctatgccgggaaggtggtggtcgtgaccgggggcgggcgcggcatcggagctgggatcgtgcgcgccttcgtgaacagcggggcccgagtggttatctgcgacaaggatgagtctgggggccgggccctggagcaggagctccctggagctgtctttatcctctgtgatgtgactcaggaagatgatgtgaagaccctggtttctgagaccatccgccgatttggccgcctggattgtgttgtcaacaacgctggccaccacccacccccacagaggcctgaggagacctctgcccagggattccgccagctgctggagctgaacctactggggacgtacaccttgaccaagctcgccctcccctacctgcggaagagtcaagggaatgtcatcaacatctccagcctggtgggggcaatcggccaggcccaggcagttccctatgtggccaccaagggggcagtaacagccatgaccaaagctttggccctggatgaaagtccatatggtgtccgagtcaactgccactgggccgcatgggccagcccgctgaggtcggggctgcggcagtgttcctggcctccgaagccaacttctgcacgggcattgaactgctcgtgacggggggtgcagagctggggtacgggtgcaaggccagtcggagcacccccgtggacgcccccgatatcccttcctgatttctctcatttctacttggggcccccttcctaggactctcccaccccaaactccaacctgtatcagatgcagcccccaagcccttagactctaagcccagttagcaaggtgccgggtcaccctgcaggttcccataaaaacgatttgcagccagaaaaaaaaa

SEQ ID NO: 134 - DNA, 5769 bp, Homo sapiens
gacggcagaggagcacttagcagcttattcagtgtccgattctgattccggcaaggatccaagcatggaatgctgccgtcgggcaactcctggcacactgctcctctttctggctttcctgctcctgagttccaggaccgcacgctccgaggaggaccgggacggcctatgggatgcctggggcccatggagtgaatgctcacgcacctgcgggggtggggcctcctactctctgaggcgctgcctgagcagcaagagctgtgaaggaagaaatatccgatacagaacatgcagtaatgtggactgcccaccagaagcaggtgatttccgagctcagcaatgctcagctcataatgatgtcaagcaccatggccagttttatgaatggcttcctgtgtctaatgaccctgacaacccatgttcactcaagtgccaagccaaaggaacaaccctggttgttgaactagcacctaaggtcttagatggtacgcgttgctatacagaatctttggatatgtgcatcagtggtttatgccaaattgttggctgcgatcaccagctgggaagcaccgtcaaggaagataactgtggggtctgcaacggagatgggtccacctgccggctggtccgagggcagtataaatcccagctctccgcaaccaaatcggatgatactgtggttgcaattccctatggaagtagacatattcgccttgtcttaaaaggtcctgatcacttatatctggaaaccaaaaccctccaggggactaaaggtgaaaacagtctcagctccacaggaactttccttgtggacaattctagtgtggacttccagaaatttccagacaaagagatactgagaatggctggaccactcacagcagatttcattgtcaagattcgtaactcgggctccgctgacagtacagtccagttcatcttctatcaacccatcatccaccgatggagggagacggatttctttccttgctcagcaacctgtggaggaggttatcagctgacatcggctgagtgctacgatctgaggagcaaccgtgtggttgctgaccaatactgtcactattacccagagaacatcaaacccaaacccaagcttcaggagtgcaacttggatccttgtccagccaggtgggaggccaccccatggaccgcgtgctcctcctcgtgtggggggggcatccagagccgggcagtttcctgtgtggaggaggacatccaggggcatgtcacttcagtggaagagtggaaatgcatgtacacccctaagatgcccatcgcgcagccctgcaacatttttgactgccctaaatggctggcacaggagtggtctccgtgcacagtgacatgtggccagggcctcagataccgtgtggtcctctgcatcgaccatcgaggaatgcacacaggaggctgtagcccaaaaacaaagccccacataaaagaggaatgcatcgtacccactccctgctataaacccaaagagaaacttccagtcgaggccaagttgccatggttcaaacaagctcaagagctagaagaaggagctgctgtgtcagaggagccctcgttcatcccaraggcctggtcggcctgcacagtcacctgtggtgtggggacccaggtgcgaatagtcaggtgccaggtgctcctgtctttctctcagtccgtggctgacctgcctattgacgagtgtgaagggcccaagccagcatcccagcgtgcctgttatgcaggcccatgcagcggggaaattcctgagttcaacccagacgagacagatgggctctttggtggcctgcaggatttcgacgagctgtatgactgggagtatgaggggttcaccaagtgctccgagtcctgtggaggaggtgtccaggaggctgtggtgagctgcttgaacaaacagactcgggagcctgctgaggagaacctgtgcgtgaccagccgccggcccccacagctcctgaagtcctgcaatttggatccctgcccagcaaggtgggaaattggcaagtggagtccatgtagtctcacatgtggggtcggcctacagaccagagacgtcttctgcagccacctgctttccagagagatgaatgaaacagtcatcctggctgatgagctgtgtcgccagcccaagcccagcacggtgcaagcttgtaaccgctttaattgccccccagcctggtaccctgcacagtggcagccgtgttccagaacgtgtggcgggggtgttcagaaacgtgaggttctttgcaagcagcgcatggctgatggcagcttcctggagcttcctgagaccttctgttcagcttcaaaacctgcctgccagcaagcatgcaagaaagatgactgtcccagcgagtggcttctctcagactggacagagtgttccacaagctgcggggaaggcacccagactcgaagcgccatttgccgaaagatgctgaaaaccggcctctcaacggttgtcaattccaccctgtgcccgcccctgcctttctcttcctccatcaggccctgtatgctggcaacctgtgcaaggcccgggcggccatccacgaagcacagcccgcacatcgcggccgccaggaaggtctacatacagactcgcaggcagaggaagctgcacttcgtggtggggggcttcgcctacctgctccccaagacggcggtggtgctgcgctgcccggcgcgcagggtccgcaagcccctcatcacctgggagaaggacggccagcacctcatcagctcgacgcacgtcacggtggcccccttcggctatctcaagatccaccgcctcaagccctcggatgcaggcgtctacacctgctcagcgggcccggcccgggagcactttgtgattaagctcatcggaggcaaccgcaagctcgtggcccggcccttgagcccgagaagtgaggaagaggtgcttgcggggaggaagggcggcccgaaggaggccctgcagacccacaaacaccagaacgggatcttctccaacggcagcaaggcggagaagcggggcctggccgccaacccggggagccgctacgacgacctcgtctcccggctgctggagcagggcggctggcccggagagctgctggcctcgtgggaggcgcaggactctgcggaaaggaacacgacctcggaggaggacccgggtgcagagcaagtgctcctgcacctgcccttcaccatggtgaccgagcagcggcgcctggacgacatcctggggaacctctcccagcagcccgaggagctgcgcgacctctacagcaagcacctggtggcccagctggcccaggagatcttccgcagccacctggagcaccaggacacgctcctgaagccctcggagcgcaggacttccccagtgactctctcgcctcataaacacgtgtctggcttcagcagctccctgcggacctcctccaccggggacgccgggggaggctctcgaaggccacaccgcaagcccaccatcctgcgcaagatctcagcggcccagcagctctcagcctcggaggtggtcacccacctggggcagacggtggccctggccagcgggacactgagtgttcttctgcactgtgaggccatcggccacccaaggcctaccatcagctgggccaggaatggagaagaagttcagttcagtgacaggattcttctacagccagatgattccttacagatcttggcaccagtggaagcagatgtgggtttctacacttgcaatgccaccaatgccttgggatacgactctgtctccattgccgtcacattagcaggaaagccactagtgaaaacgtcacgaatgacagtgatcaacacggagaagcctgcagtcacagtcgatataggaagcaccatcaaaacagtgcagggagtgaatgtgacaatcaactgccaggttgcaggagtgcctgaagctgaagtcacttggttcaggaataaaagcaaactgggctccccgcaccatctgcacgaaggctccttgctgctcacaaacgtgtcctcctcggatcagggcctgtactcctgcagggcggccaatcttcatggagagctgactgagagcacccagctgctgatcctagatcccccccaagtccccacacagttggaagacatcagggccttgctcgctgccactggaccgaaccttccttcagtgctgacgtctcctctgggaacacagctggtcctggatcctgggaattctgctctccttggctgccccatcaaaggtcaccctgtccctaatatcacctggtttcatggtggtcagccaattgtcactgccacaggactgacgcatcacatcttggcagctggacagatccttcaagttgcaaaccttagcggtgggtctcaaggggaattcagctgccttgctcagaatgaggcaggggtgctcatgcagaaggcatctttagtgatccaagattactggtggtctgtggacagactggcaacctgctcagcctcctgtggtaaccggggggttcagcagccccgcttgaggtgcctgctgaacagcacggaggtcaaccctgcccactgcgcagggaaggttcgccctgcggtgcagcccatcgcgtgcaaccggagagactgcccttctcggtggatggtgacctcctggtctgcctgtacccggagctgtgggggaggtgtccagacccgcagggtgacctgtcaaaagctgaaagcctctgggatctccacccctgtgtccaatgacatgtgcacccaggtcgccaagcggcctgtggacacccaggcctgtaaccagcagctgtgtgtggagtgggccttctccagctggggccagtgcaatgggccttgcatcgggcctcacctagctgtgcaacacagacaagtcttctgccagacacgggatggcatcaccttaccatcagagcagtgcagtgctcttccgagacctgtgagcacccagaactgctggtcagaggcctgcagtgtacactggagagtcagcctgtggaccctgtgcacagctacctgtggcaactacggcttccagtcccggcgtgtggagtgtgtgcatgcccgcaccaacaaggcagtgcctgagcacctgtgctcctgggggccccggcctgccaactggcagcgctgcaacatcaccccatgtgaaaacatggagtgcagagacaccaccaggtactgcgagaaggtgaaacagctgaaactctgccaactcagccagtttaaatctcgctgctgtggaacttgtggcaaagcgtgaagatagggtgtggggaaaaactctaccctggccacacgaaggactcacgcaaccacctcggacagaacctaagctttcttcattttatttatttatttccccctccccactccacacacacccttccaacctcctccacctccaccttcaagcataaggacgtccgcgtgttttctctttcagttagctggaggacaggatgttgggaaaggaaaggacagatgtctaaaggaggttgcagagcaggccaggcagacagtgggggctcccttgaagagcttcctccctcccaaacctgggtctcaaagacctagaaagaggcaggcacagcccctgcggacagcagggagccagaaggtttgtagcctattggtgcaaacattggacaaattcctgtgtctttcctagaagcgcagtcgacgcggccgcgaattcccgggtcgacgtgctcactagtcggcggccgc

SEQ ID NO: 135 - DNA, 983 bp, Homo sapiens
ggggcagacagaagaatgtggagtggatcgaggggatgtcgggaggacctcccagggtggcccctgcatagtgggacttgagactggacaaggagcagcccccagtggttaggactgaggagggggatgggatttttctccaaggaaacacccttctcaagtactcttgtccctgcccaggagacacccaggtcctttgaatgcacctgcccgcgtgggttctacgggctgcggtgtgaggtgagcggggtgacatgtgcagatggaccctgcttcaacggcggcttgtgtgtcgggggtgcagaccctgactctgcctacatctgccactgcccacccggtttccaaggctccaactgtgagaagagggtggaccggtgcagcctgcagccatgccgcaatggtgaggcctggaggcctgaacggcgagggatggggtgggggtcctggatggctcagacagtccagggttggaatcctggctttgactcttctaaccctagggcctggggacctgaccttccacctgcaagcctgtaaaatgggcaaggagacattccctatctcataactattaatatttactgagaatttactgtgtgccaggccctattctaggcactgaggatacagcagggaatgaaacagacaaagtccctggccctgcctgatagagctgaggtgcctggtgtgctgaggataagcagggaagccagtgtggttatactgagatgaggtcagggaggtgactgaggcacatcttgtgggaccccctgggtcacaagaaggggaactttcacttttcccctgagtgagatggagccacaggaaggttctgaggagagaagagacctgatatcggtgctaaaagattaaatgcggcccggcacggcgactcacgcctgtaattccagcactttgggaggccgaggcgggcagatcacctgagctcaggagttggagaccagcccgggccacatggt

SEQ ID NO: 136 - DNA, 618 bp, Homo sapiens
  SITE (525): n equals a,t,g, or c
  SITE (539): n equals a,t,g, or c
  SITE (553): n equals a,t,g, or c
aaagctggagctccaccgcggtggcggccgctctagaactagtggatcccccgggctgcaggaattcggcacgaggtgaaagtggggatccttccagatgagagccatcaggccacggttgcccaccgtggtgataaggtagatcaccaggaacaccaggaacaagggcgcctgcagctctagaagatctgtaagtccttggaggacggagttcataatctgtgtcttatccctcggcagtttagcctttgcagatgcatgcacttcatcttctgtgactcccaagatgttcgtacattttttatctwagaatcatatgatatccctggttgggtgcatgatccagttttatatttttgcttccggtgcaaacacaggaagtttcctcctggtagtgatggcctatgactgttatatggccatatgtaaccctttgctttatcctctagtgatgtccaataccttctgcattcaattatcaggtgtttcatttattattgtttttttcatcctataacgcaagtnggtttgttatttcnattaactttctgcnagtccatgttatacattatttctctgtgatattttacacggtttggaatttcctgtactgaacct

SEQ ID NO: 137 - DNA, 530 bp, Homo sapiens
ggcccagatttattcagtggcaatttttcttggtattaatttggccgcatttatcatcatagttttttcctatggaagcatgttttatagtgttcatcaaagtgccataacagcaactgaaatacggaatcaagttaaaaaagagatgatccttgccaaacgttttttctttatagtatttactgatgcattatgctggatacccatttttgtagtgaaatttctttcactgcttcaggtagaaataccaggtaccataacctcttgggtagtgatttttattctgcccattaacagtgctttgaacccaattctctatactctgaccacaagaccatttaaagaaatgattcatcggttttggtataactacagacaaagaaaatctatggacagcawaggtcagaaaacatatgctccatcattcatctgggtggaaatgtggccactgcaggagatgccacctgagttaatgaagccggaccttttcacatacccctgtgaaatgtcactgatttctcaatcaacga

SEQ ID NO: 138 - DNA, 609 bp, Homo sapiens
ctggagccgccggcctccgaccccgagctgcagcccgccgagcgcccgctgccatcgccggggtccggggagggcgccccggtcttcctcacggggcctcgatcccagtgggtgctgcggggggcggaggtggtgctgacgtgccgggcggggggcctccccgagcccacactgtactgggagaaggacgggatggccctggacgaagtgtgggacagcagccacttcgcgctccagccgggccgcgccgaggacggccccggcgcgagcctggcattgcgcatcctggcggctcggctgccggattccggcgtctacgtgtgccacgcccgcaacgcgcacggccacgcgcaggcgggggcgctgctccaggtgcaccagccccccgagagcccgcccgcggaccccgacgaggcccccgcgccggtggtggagccgctcaagtgcgcgcctaagaccttctgggtgaacgagggcaagcacgccaagttccgctgctacgtgatgggcaagcccgagcccgagatcgaatggcactgggagggccgcccgctgctcccggaccgccgccgcctcatgtaccgcgaccgcgacggcggcttcgtgctc

SEQ ID NO: 139 - DNA, 2415 bp, Homo sapiens
  SITE (1348): n equals a,t,g, or c
  SITE (2333): n equals a,t,g, or c
ggcggggataaatgcggagggacggtccagctttactctctgctcgccgccgccgctgtcgccgccacctcctctgatctacgaaagtcatgttacccaacaccgggaggctggcaggatgtacagtttttatcacaggtgcaagccgtggcattggcaaagctattgcattgaaagcagcaaaggatggagcaaatattgttattgctgcaaagaccgcccagccacatccaaaacttctaggcacaatctatactgctgctgaagaaattgaagcagttggaggaaaggccttgccatgtattgttgatgtgagagatgaacagcagatcagtgctgcagtggagaaagccatcaagaaatttggaggaattgatattctggtaaataatgccagtgccattagtttgaccaatacattggacacacctaccaagagattggatctgatgatgaacgtgaacaccagaggcacctaccttgcatctaaagcatgtattccttatttgaaaaagagcaaagttgctcatatcctgcaatatcagtccaccactgaacctaaatccagtttggttcaaacagcactgtgcttataccattgctaagtatggtatgtctatgtatgtgcttggaatggcagaagaatttaaaggtgaaattgcagtcaatgcattatggcctaaaacagccatacacactgctgctatggatatgctgggaggacctggtatcgaaagccagtgtagaaaagttgatatcattgcagatgcagcatattccattttccaaaagccaaaaagttttactggcaactttgtcattgatgaaaatatcttaaaagaagaaggaatagaaaattttgacgtttatgcaattaaaccaggtcatcctttgcaaccagatttcttcttagatgaatacccagaagcagttagcaagaaagtggaatcaactggtgctgttccagaattcaaagaagagaaactgcagctgcaaccaaaaccacgttctggagctgtggaagaaacatttagaattgttaaggactctctcagtgatgatgttgttaaagccactcaagcaatctatctgtttgaactctccggtgaagatggtggcacgtggtttcttgatctgaaaagcaagggtgggaatgtcggatatggagagccttctgatcaggcagatgtggtgatgagtatgactactgatgactttgtaaaaatgttttcagggaaactaaaaccaacaatggcattcatgtcagggaaattgaagattaaaggtaacatggccctagcaatcaaattggagaagctaatgaatcagatgaatgccagactgtganaggaaaatataaaaaaaaagtcgactgctatgctcaaaaagtaaaaaaagctcaacagttaaaatctaatgtttgttttctttcctgttatattataaggatatgcacgtttgttctggaaaagatagaatttgtctctaaaagacttgaaattgtaattaaaatggcaagctaatcaaacataagcttcattaagtgggattctaagacagtctgtgtttttatatttcaagggtttaaccctttgagccttacatctcattcactgtctttctccaagaaaagtattttgggcggacagtcagatcaagcagtaaaattagctctttcaaatcttcttgtcatgtaaaatgaagctagtctgttttaaaatttttagttttggattgtatactaatgaaaatcttaatgatgtttttgatttttatatacttattttaaagaaaatcttatatagtacattttacaaaaattataaaaaatgaattagtactggcgaggactaaatgaaacaataatttttcattttgataactagctttccaggtggacttagccataggaaaatattactaatgtaatttaacaaattgctgcatgtattccatttaaaaatatgtttaaattgtcctaaaacaaaataattttctccctaggagtatgcatttggctacagtgttttgaaacagaaaccttagaataggtcattggtatgggctgaactgtgtatcccccaattcatttgttgaggtcctaactcccatttcttttgaatgtgactgttcggagatgaggcctttaaagaggtgacttaagttcaaaggaggctgttagtctaatccaacatggtgtcctttggacataagagataccagcaatgtgtgcacagaacaaagaccaggagaggacacagtgagaaggcagttatctgcaagcaaagagagaggcttcagaagaaacaaawtcaccagcaccttgatctttngacttctaatytccagawtagtgagraataaatttctgttgttaaggccktccactgttgggaggccgccgcaggaggattt

SEQ ID NO: 140 - DNA, 942 bp, Homo sapiens
cggacaccagccagccctggtgcatcccccggcagcgcgacaggttcacagtgaaggctccgtgctaccgggagcccgacctgagccagaagccccggttcctggtgggcctgcggtcccacctgctgccccagggctgcgagtgctgcatgagctgtgccgtgcagggctcgccccggccccacgtcacctggttcaagaatgaccgcagcctggaaggaaaccccgcggtgtacagcactgacctgctgggcgtgtgctccctcaccatccccagcgtatccccgaaggacagcggggagtacaaggctgtggctgagaacacgctgggccaggcagtcagcactgccaccctcattgtcatagaacccagcacctagcctcacctcaccctgggatggtcctggacccttgaagcttcacttccgacacctgcactggcccgggaagccaatcccaaggatggaggctgtgcccagagccccaggaaaatgggagtgagaagatgcctggcgaggttttggccaggaggacgtgaagtccttggggaagaaaaacaagggaggagggcattccacctcctggctccaagctaagtcactcaacagaatgacagcgaacctcctggaccctcaccatatgggtttctttcttcttcgcatcaggagatccagagggcacctgcctgcaggatgggccggctccttattttcctgggctgagccgtttggagggagggtgggcacagctgggcctgctgtgaccactgggagggaagaggagaggaggtcagaggacctgggtgaggactagggcatcaaggtcgtgtgtgtgggtgggggcagcctccacctcctggattcaagagattccaggggtgcagcaagtgctttctatgcgtttcttcattaaaacttaggctaataaaaaaaaaaaaaaaaa

SEQ ID NO: 141 - DNA, 2813 bp, Homo sapiens
ggcacgagtattatttttgcgggaggtgataagtggtcagtggatcctcgagtttcaatttcaacattgaataaaagggactacagcctccagatacagaatgtagatgtgacagatgatggcccatacacgtgttctgttcagactcaacatacacccagaacaatgcaggtgcatctaactgtgcaagttcctcctaagatatatgacatctcaaatgatatgaccgtcaatgaaggaaccaacgtcactcttacttgtttggccactgggaaaccagagccttccatttcttggcgacacatctccccatcagcaaaaccatttgaaaatggacaatatttggacatttatggaattacaagggaccaggctggggaatatgaatgcagtgcggaaaatgatgtgtcattcccagatgtgaggaaagtaaaagttgttgtcaactttgctcctactattcaggaaattaaatctggcaccgtgacccccggacgcagtggcctgataagatgtgaaggtgcaggtgtgccgcctccagcctttgaatggtacaaaggagagaagaagctcttcaatggccaacaaggaattattattcaaaattttagcacaagatccattctcactgttaccaacgtgacacaggagcacttcggcaattatacttgtgtggctgccaacaagctaggcacaaccaatgcgagcctgcctcttaaccctccaagtacagcccagtatggaattaccgggagcgctgatgttcttttctcctgctggtaccttgtgttgacactgtcctctttcaccagcatattctacctgaagaatgccattctacaataaattcaaagacccataaaaggcttttaaggattctctgaaagtgctgatggctggatccaatctggtacagtttgttaaaagcagcgtgggatataatcagcagtgcttacatggggatgatcgccttctgtagaattgctcattatgtaaatactttaattctactcttttttgattagctacattaccttgtgaagcagtacacattgtcctttttttaagacgtgaaagctctgaaattacttttagaggatattaattgtgatttcatgtttgtaatctacaacttttcaaaagcattcagtcatggtctgctaggttgcaggctgtagtttacaaaaacgaatattgcagtgaatatgtgaattctttaaggctgcaatacaagcattcagttccctgtttcaataagagtcaatccacatttacaaagatgcatttttttcttttttgataaaaaagcaaataatattgccttcagattatttcttcaaaatataacacatatctagatttttctgctcgcatgatattcaggtttcaggaatgagccttgtaatataactggctgtgcagctctgcttctctttcctgtaagttcagcatgggtgtgccttcatacaataatatttttctctttgtctccaactaatataaaatgttttgctaaatcttacaatttgaaagtaaaaataaaccagagtgatcaagttaaaccatacactatctctaagtaacgaaggagctattggactgtaaaaatctcttcctgcactgacaatggggtttgagaattttgccccacactaactcagttcttgtgatgagagacaatttaataacagtatagtaaatataccatatgatttctttagttgtagctaaatgttagatccaccgtgggaaatcattccctttaaaatgacagcacagtccactcaaaggattgcctagcaatacagcatcttttcctttcactagtccaagccaaaaattttaagatgatttgtcagaaagggcacaaagtcctatcacctaatattacaagagttggtaagcgctcatcattaattttattttgtggcagctaagttagtatgacagaggcagtgctcctgtggacaggagcattttgcatattttccatctgaaagtatcactcagttgatagtctggaatgcatgttatatattttaaaacttccaaaatatattataacaaacattctatatcggtatgtagcagaccaatctctaaaatagctaattcttcaataaaatctttctatatagccatttcagtgcaaacaagtaaaatcaaaaaagaccatcctttatttttccttacatgatatatgtaagatgcgatcaaataaagacaaaacaccagtgatgagaatatcttaagataagtaattatcaaattattgtgaatgttaaattatttctactataaagaagcaaaactacatttttgaaggaaaatgctgttactctaacattaatttacaggaatagtttgatggtttcactctttactaaagaaaggccatcaccttgaaagccattttacaggtttgatgaagttaccaatttcagtacacctaaatttctacaaatagtccccttttacaagttgtaacaacaaagaccctataataaaattagatacaagaaattttgcagtggttatacatatttgagatatctagtatgttgccctagcagggatggcttaaaaactgtgattttttttcttcaagtaaaacttagtcccaaagtacatcataaatcaattttaattagaaaaatgaatcttaaatgaggggacataagtatactctttccacaaaatggcaataataaggcataaagctagtaaatctactaactgtaataaatgtatgacattattttgattgatacattaaaaaagagtttttagaacaaaaaaaaaaaaaaaaaaaa

SEQ ID NO: 142 - DNA, 912 bp, Homo sapiens
  SITE (5): n equals a,t,g, or c
  SITE (911): n equals a,t,g, or c
gtacngattcccggtcgacccacgmgccgacatggagctgttcctcgcgggccgccgggtgctggtcaccggggcaggcaaaggtatagggcgcggcacggtccaggcgctgcacgcgacgggcgcgcgggtggtggctgtgagccggactcaggcggatcttgacagccttgtccgcgagtgcccggggatagaacccgtgtgcgtggacctgggtgactgggaggccaccgagcgggcgctgggcagcgtgggccccgtggacctgctggtgaacaacgccgctgtcgccctgctgcagcccttcctggaggtcaccaaggaggcctttgacagatcctttgaggtgaacctgcgtgcggtcatccaggtgtcgcagattgtggccaggggcttaatagcccggggagtcccaggggccatcgtgaatgtctccagccagtgctcccagcgggcagtaactaaccatagcgtctactgctccaccaagggtgccctggacatgctgaccaaggtgatggccctagagctcgggccccacaagatccgagtgaatgcagtaaaccccacagtggtgatgacgtccatgggccaggccacctggagtgacccccacaaggccaagactatgctgaaccgaatcccacttggcaagtttgctgaggtagagcacgtggtgaacgccatcctctttctgctgagtgaccgaagtggcatgaccacgggttccactttgccggtggaagggggcttctgggcctgctgagctccctccacacacctcaagccccatgccgtgctcatcctacccccaatccctccaataaacctgattctgctgcccaaaaaaaaaaaaaaaaaaaaaaaaaaaaaaaaaaaaaaaaaaaaaaaaaaaaaaaaaaaaaaaaaana

SEQ ID NO: 143 - DNA, 810 bp, Homo sapiens
tttttttttttttttttttccaaaaacaccattttaataaggaaacaacagaaataaaagattgttctctggctggagcccagaccccatataatacattacatgtacaaagtggcttggtggcatytcctcctaggtggtatatacaggaggtggagggacagcaggaagcaaggagccttgctgytggactgtggtgcaagtctgagttgacttccctagactgcccccacctagatggagacttcatattctctcgtctctccagtctcgtaagttggattgtcaaacgctgactctatggtaatgcggttgtaggggcgggggcgggggcgggtattccacctcataggaatcatacactggtggggcctccacgttgtccccattgcgaatgatgagcctgtcatcatcctctgccagggaaaccttctcaaagtgcaggtgtagccgctggccctcaggagcctcaagcagccagtgacaggtgaggttgttgctgtagttgcccgggaagcctggagagacgatgcggccggtggtggcattgcggatcactccgccgcaagcagcgatgcakacgggctcctttgaatcccagawgggctgggtggcattgagacaggtgagatgcctggcgcccttcagctggtagccagtggcacaatggaagcgggcactaccccctgggtggaggctggtgacagtcacatctccataagctggacgacggggaaagtggcagctcaggagataggcttggtaatggaaatggaaggtgccagggccagccggtggcgggaggctctg

SEQ ID NO: 144 - DNA, 2370 bp, Homo sapiens
tgcaggaattcggcacgagcaccatccagaaccgagcagatctcgtgataaatgaagtgatgtggtgggaccatggagtgtattactgcaccattgaggctccaggggacacatcaggagaccccgataaggaagtaaagctcatcgtcctacactggctgacagtgatcttcatcatcctgggagccctcctcctcctgctgctgattggagtgtgctggtgccagtgctgtcctcagtattgctgctgctatatccgctgtccctgctgtcctgcccactgctgctgtcctgaggaagccctggcccgccaccgctacatgaagcaggcccaggccctaggtcctcagatgatgggaaaacccctgtactggggggcggacaggagctcccaggtttcatcttatccaatgcacccgctgctgcagcgagatttgtccctgccgtccagcctcccgcagatgccaatgacccagaccaccaatcagcctcccatcgccaatggtgtcctggagtatttggagaaagaactgcggaacctcaacctggcccagcctctgccccctgacctcaaaggcagatttggccatccctgcagcatgctgtcctccctgggctctgaggtcgtggaacgcagaatcatccacctgcccccactgatcagagacctgtcatcctcaaggaggaccagtgactccctgcaccagcagtggctcaccccaattccctccaggccctgggatctgagggaggggagaagccaccaccattaccctgatttccaccaggagctccaggaccgggggccaaagtcttgggcattggaaagaagggagttggacccatcgtggagtggaaggcaccgtagctctaggctgaatgggtcacccatacactggtcagacagggacagcctaagcgatgtcccctcatccagtgaggcacgctggcggccgagccaccctcctttcaggagccgctgtcaggagaggccccgcaggcccagcccccgggagagcactcagaggcacgggagacgacgcaggcaccgcagctactctcctcccttgccctccggcctcagttcctggagctctgaagaggacaaggagaggcagccccagagctggcgggcccaccgccgcggctcgcactccccacactggcccgaggagaagccgcctagctaccgctcactggatatcactccaggcaagaatagcaggaaaaaagggagtgtggagaggcgctcggagaaagacagctctcatagtggaaggagtgtggtcatttagtcaccaagcacagcacaacttctgtggctacttctcggctcctgtgtgtcatcagcatcacctaggtttccagctgacttgggaactgcaagtctgagtctaacagtttttggcttagattctgagaatcaaatagaagaattttaaatacaagagtttgagattgggtatagtggctcacacctgtaatcacagcactttgggaggctaagaatcacttgagactaggagttcaagatcagcctgggaaacatagtgagaccccgtctctacaaaaaatataaaaattagttaggtgtgggggcatgcacttgtagtcccagctactcaagaggctgaggcagaaggatcccttgagcccaggagtgcaaggctgcaatgagccaggatcccatgatcacacatctgtattccagcctgggcaatagagcaagtccccattactaaaaaacccaaaaggccaaaaaacaaaaaagttagagttcgaggaattaccaactgtagttttagccttggttcatgctctcttgcatatttatataatctctgacttgtaatggaccctgactggaatgtgatccctcaggaacttagtagcctgagtctttcagtagactacactgcccagaaccctggccattctcaaaatgagaacttgggaatgtttaagaagaaatcaaacatgtttcaggaaaaggaaatctatggagtattatagggacattcccatgggaatgtatcttcctccatggcatgtcttgagggtcctttcttgttaggagtttatcctgccagcccataaatggactatttattgtaagtgtagaaaatcacagagaagcagttttgcaccagccttattcctgtgccttgttttcctcttgctctttttttacctgtatatctaatttatattttcatatatattgtgtattgattgaagtcactttaaatccttcttgggaatgacacagtatataaataaggaagaaagaaaacatgccaagctgagcatgctgctccaaataaatatctgctttcctaaaaaaaaaaaaaaaaaaaaaaaaaaaaaaaa

SEQ ID NO: 145 - DNA, 302 bp, Homo sapiens
tcatgcattgcaccctagataacatctcatgagccctaaattgggatttgatgcttttctggatcctgggctctacagatggaatcatttatgctgtgacacattttccttctcctactgtgggtctcgggaaatagcccacttcttctgtgagttacytcctactaatcctctcatgcatgaamatcaatatttgaaaggttattttcattgctctatagtaatgcttgtttccctgttgcatcacatgttcctatgctggagttatctggctgtcatcacatggatctggagaggcggcg

SEQ ID NO: 146 - DNA, 745 bp, Homo sapiens
  SITE (636): n equals a,t,g, or c
  SITE (675): n equals a,t,g, or c
  SITE (693): n equals a,t,g, or c
  SITE (726): n equals a,t,g, or c
  SITE (733): n equals a,t,g, or c
  SITE (738): n equals a,t,g, or c
gggggaaacgtggcaaccaacgctggaggcctgcggtttcttcgatatggctcactgcatgggactgtcctgggcctggaagtggtgctggccgacggcactgtcctggactgcctgacctccctgaggaaggacaacacgggctatgacctgaagcagctgttcatcgggtcggagggcactttggggatcatcaccacggtgtccatcttgtgtccacccaagcccagggctgtgaacgtggctttcctcgtcacctgtgtgccgcccgcctgtggtcctgggagcccgaggccagcccggctgccgcatcctgctcttcgcactccaggctgcccaggctttgctgaggttctgcagaccttcagcacctgcaaggggatgctgggtgagatcctgtctgcattcgagttcatggatgctgtgtgcatgcagctggtcgggcgccatctccacctggccagcccggtgcaagagagtccgttttacgtcctcatcgagacttcaggctccaacgcaggccatgacgctkagaagctgggccacttctggagcacgcgctgggctccggcctggtgaccgatgggaccatggccaccgaccagaggaaagtcaagatgctgtgggccccctganggaaaagggatcacagaagccctttaacccgggaatggnttaccctggtacccaggnacgaacttttcccttcccttgggggaagcgggnttttacnaacantcgggga

SEQ ID NO: 147 - DNA, 733 bp, Homo sapiens
  SITE (546): n equals a,t,g, or c
  SITE (580): n equals a,t,g, or c
  SITE (598): n equals a,t,g, or c
  SITE (634): n equals a,t,g, or c
  SITE (656): n equals a,t,g, or c
  SITE (667): n equals a,t,g, or c
gtcttgccctcatctctctgtctctctgtgtctgtgtctcccccgctcattcccatttgcaggtgcaatgtagcaggacaactcatggagcccccccgggcccatcgagtaccggactggctgaccccctagggttggcagtagcccctgaccctcagtatggccaacactaccggagagcctgaggaggtgagcggcgctctgtccccaccgtccgcatcagcttatgtgaagctggtactgctgggactgattatgtgcgtgagcctggcgggtaacgccatcttgtccctgctggtgctcaaggagcgtgccctgcacaaggctccttactacttcctgctggacctgtgcctggccgatggcatacgctctgccgtctgcttcccctttgtgctggcttctgtgcgccacggctcttcatggaccttcagtgcactcagctgcaagattgtggcctttatggccgtgctcttttgcttccatgcggccttcatgctgttctgcatcagcgtcacccgctacatggccatcgcccaccaccgnttctacgccaagcgcatgacactctggacatgcncggctgcatctgcatggnctggaccctgtctgtggccatggcctttccacctgnctttgacgtgggcacctacagnttattcgggangaggaccagtgcatctttgacatcggtactttaaggccaatgacacctgggcttcatgctaagttg

SEQ ID NO: 148 - DNA, 1772 bp, Homo sapiens
  SITE (1772): n equals a,t,g, or c
atgaacgcccgctcgaaattaaccctactaaagggaacaaaagctggagctccaccgcggtggcggccgctctagaactagtggatcccccgggctgcaggaattcggcacgagccggtattctctctgtctctcatcccacactgccttctgcccaccagcctcctgtgatccctgccacacacccagctttgtcccgtgaacacgaatgtgtggaggaggtggatggtcacgtgtcctgccgctgcactgagggcttccggctggcagcagacgggcgcagttgcgaggacccctgtgcccaggctccgtgcgagcagcagtgtgagcccggtgggccacaaggctacagctgccactgtcgcctgggtttccggccagcggaggatgatccgcaccgctgtgtggacacagatgagtgccagattgccggtgtgtgccagcagatgtgtgtcaactacgttggtggcttcgagtgttattgtagcgagggacatgagctggaggctgatggcatcagctgcagccctgcaggggccatgggtgcccaggcttcccaggacytcggagatgagttgctgratgacggggaggatgaggaagatgaagacgaggcctggaaggccttcaacggtggctggacgragatgcctgggatcctgtggatggagcctacgcagccgcctgactttgccctggcctatagaccgagcttcccagaggacagagagccacagataccctacccggagcccacctggccacccccgctcagtgcccccagggtcccctaccactcctcagtgctctccgtcacccggcctgtggtggtctctgccacgcrtcccacactgccttctgcccaccagcctcctgtgatccctgccacacacccagctttgtcccgtgaccaccagatccccgtgatcgcagccaactatccagatctgccttctgcctaccaacccggtattctctctgtctctcattcagcacagcctcctgctgccacccagcccgcagccctccccaccctcctgccctctcagagccccactaaccagacctcacccatcagccctacacatccccattccaaagccccccaaatcccaagggaagatggccccagtcccaagttggccctgtggctgccctcaccagctcccacagcagccccaacagccctgggggaggctggtcttgccgagcacagccagagggatgaccggtggctgctggtggcactcctggtgccaacgtgtgtctttttggtggtcctgcttgcactgggcatcgtgtactgcacccgctgtggcccccatgcacccaacaagcgcatcactgactgctatcgctgggtcatccatgctgggagcaagagcccaacagaacccatgccccccaggggcagcctcacaggggtgcagacctgcagaaccagcgtgtgatggggtgcagacccccctcatggagtatggggcgctggacacatggccggggctgcaccagggacccatgggggctgcccagctggacagatggcttcctgctccccaggcccagccagggtcctctctcaaccactagacttggctctcaggaactctgcttcctggcccagcgctcgtgaccaaggatacaccaaagcccttaagacctcagggggcgggtgctggggtcttctccaataaatggggtgtcaaccttaaaaaaaaaaaaaaaaaaaaactcgagggggggcccgtacccaattcgccatatagtgcccn

SEQ ID NO: 149 - DNA, 519 bp, Homo sapiens
  SITE (7): n equals a,t,g, or c
gcagtanccgacagtaccgtccgaattcccggtcgacccacgcgtccgggttttatgtgttagattcctctgaatataactttcacattttgtcctcttttgtgctaatagaacattctagtatgccagtagaaaaaaatatcactttagaaaggccttctaatgtaaatctcacatgccagttcacaacatctggggatttgaatgcagtaaatgtgacttggaaaaaagatggtgaacaacttgagaataattatcttgtcagtgcaacaggaagcaccttgtatacccaatacaggttcaccatcattaatagcaaacaaatgggaagttattcttgtttctttcgagaggaaaaggaacaaaggggaacattaatttcaaagtccctgracttcatggggaaaaacaagccattgatctcttacgtgggggattctactgtcttgacatgtaaatgkcaaattgtttccttaaattggaccggkacatagtaatgggagtgtaaaggtccgccca

SEQ ID NO: 150 - DNA, 2442 bp, Homo sapiens
  SITE (1648): n equals a,t,g, or c
  SITE (2431): n equals a,t,g, or c
aaaagctatttaggtgacactatagaaggtacgcctgcaggtaccggtccggaattcccgggtcgacccacgcgtccgaacgaatgcatcccccacaatggctgtcgccacggcacctgcagcactccctggcaatgtacttgtgatgagggctggggaggcctgttttgtgaccaagatctcaactactgcacccaccactccccatgcaagaatggggcaacgtgctccaacagtgggcagcgaagctacacctgcacctgtcgcccaggctacactggtgtggactgtgagctggagctcagcgagtgtgacagcaacccctgtcgcaatggaggcagctgtaaggaccaggaggatggctaccactgcctgtgtcctccgggctactatggcctgcattgtgaacacagcaccttgagctgcgccgactccccctgcttcaatgggggctcctgccgggagcgcaaccagggggccaactatgcttgtgaatgtccccccaacttcaccggctccaactgcgagaagaaagtggacaggtgcaccagcaacccctgtgccaacgggggacagtgcctgaaccgaggtccaagccgcatgtgccgytgccgtcctggattcacgggcacctactgtgaactccacgtcagcgactgtgcccgtaacccttgcgcccacggtggcacttgccatgacctggagaatgggctcatgtgcacctgccctgccggcttctctggccgacgctgtgaggtgcggacatccatcgatgcctgtgcctcgagtccctgcttcaacagggccacctgctacaccgacctctccacagacacctttgtgtgcaactgcccttatggctttgtgggcagccgctgcgagttccccgtgggcttgccgcccagcttcccctgggtggccgtctcgctgggtgtggggctggcagtgctgctggtactgctgggcatggtggcagtggctgtgcggcagtgcggcttcgacggccggacgacggcagcagggaagccatgaacaacttgtcggacttccagaaggacaacctgattcctgccgcccagcttaaaaacacaaaccagaagaaggagctggaagtggactgtggcctggacaagtccaactgtggcaaacagcaaaaccacacattggactataatctggccccagggcccctggggcgggggaccatgccaggaaagtttccccacagtgacaagagcttaggagagaaggcgccactgcggttacacagtgaaaagccagagtgtcggatatcagcgatatgctcccccagggactccatgtaccagtctgtgtgtttgatatcagaggagaggaatgaatgtgtcattgccacggaggtataaggcaggagcctacctggacatccctgctcagccccgcggctggaccttccttctgcattgkttacattgcatcctggatgggacgtttttcatatgcaacgtgctgctctcaggaggaggagggaatggcaggaaccggacagactgtgaacttgccaagagatgcaatacccttccacacctttgggtgtctgtctggcatcagattggcagctgcaccaaccagaggaacagaagagaagagagatgccactgggcactgncctgccagtagtggccttcagggggctccttccggggctccggcctgttttccagagagagtggcagtagccccatggggcccggagctgctgtggcctccactggcatccgtgtttccaaaagtgcctttggcccaggctccacggcgacagttgggcccaaatcagaaaggagagagggggccaatgagggcagggcctcctgtgggctggaaaaccactgggtgcgtctcttgctggggtttgccctggaggtgaggtgagtgctcgagggaggggagtgctttctgccccatgcctccaactactgtatgcaggcctggctctctggtctaggccctttgggcaagaatgtccgtctacccggcttccaccaccctctggccctgggcttctgtaagcagacaggcagagggcctgcccctcccaccagccaagggtgccaggcctaactggggcactcagggcagtgtgttggaaattccactgagggggaaatcaggtgctgcggccgcctgggccctttcctccctcaagcccatctccacaacctcgagcctgggctctggtccactactgccccagaccaccctcaaagctggtcttcagaaatcaataatatgagtttttattttgtttttttttttttttttgtrgtttattttggagtctagtatttcaataatttaagaatcagaagcactgacctttctacattttataacattattttgtatataatgtgtatttataatatgaaacagatgtgtacaggagtttatnaaaaaaaaaaa

SEQ ID NO: 151 - DNA, 602 bp, Homo sapiens
ttttttttttttttttttttttttttttgcaatttagggcctttattgaccgaggagggtatggaggtttgagggccagtgagcccaccatagtggagcctgacctcagcaggccactggctggagctggaagtctggggggacactgcccaggccagtgcactgcaggtgaggttgatggtgccagggcgtaccacagggagcaggcagaacctctgtaaggtggccgtaaggaataggaagatacccgagtgggccaggcctgtgcccaggcacatctgctttgccgggtacacaggtgcacagtgagcaccaggtaccccagagccagtccaggctggtccccttcctcctctgcctgcacctgaggcaaagggcatgaaagcatcattgccctggaacttgcccttgtccaggaagttggtagggttgaagcagtctgggtctttgaattgagtggggtcccggtgtgcagtcacaagcaggggaatcacaaaagtgccctggggatacatgcaacttgggttacctgcgggcttggtgagcacctgcaccacctccatccaagacgctttttaaaagcccaagggaataggccgggc

SEQ ID NO: 152 - DNA, 1364 bp, Homo sapiens
ggcacgagcttgcatgttggtgtttgcagtcacatggaatacccctgccgcttccagaatgcttctgccaccacccaggagatcattcctcatcgggtctttgcccctgtgtgcctcacgggtgcctgccaagagacccttctgcggctgatccctccttgcctctcagcagcacattctgttctgggagcacacccgttctctcggctggatgttctcatcgtccctgccaactttccaagtctggggatggccagcccacacatcatgttcctctctcagagcatcttgacaggagggaaccatctctgtgggacccgcctctgccatgaaattgcccatgcctggtttggcctagccatcggggcccgagactggacggaggagtggctgagtgaaggcttcgccactcacttggaggatgtgttttgggccacagcacagcagctggccccctatgaggcccgggagcagcaggagctgagggcttgtctgcgctggcgtcgcctccaggacgagatgcaatgctcccccgaggagatgcaggtgttaagctcttaagaacttccagtcctctggaatctgctttctgctctcaccagtacaggaaaactgttttttccttggctcattgtgccctgacagtcaccagattatggaagcaaattttatttttaatcttttgagactcttctgctttgtttggtactgttgacagctcttctggaagtttttgtcactggcttttgtggcagtccctcacctgattcttcttgccctctgtcattcctcctccatctccttcgaggtctgccctttgcctgcctgtgtcttcagagctgatcttcctcggggcctccacactcggctgcgtgtcctcccagagtggtctcatctaaacccccatcttaggtgggagtctccaggtgcagaccctgatgcaaggggtatgggaaagagatttattaggaattgttctgatacgggttggctgtgtgtccccgcccaaatctcatgttgaattgtaatccccagtgttggaggtggggcctggcgggaggtgactggatcacagaggtggtttgtcatggtttaacaccatccccccttggtgctgtggtcacaatagtgagtgagttctcatgagctctggttatttaaaagtgtgtggcaccttcctccaccaactgtctccctcccgccccagccatgtaagatgtcctgcttcccctttgccttctgccataattgtaagtttcctgaggcctccgagcaggtgacagcatcatgcttcctgtacaacctgcagaaccgtgagccaattaaacctcttttatttataaattaaaaaaaaaaaaaaaaaa

SEQ ID NO: 153 - DNA, 1448 bp, Homo sapiens
gggtcgacccacgcgtccgcctcaacattcctcattattgaccctctcttgggacttttgaagattcaagaaacacaagatctggatgctggcgattatacctgtgtagccatcaatgaggctggaagagcaactggcaagataactctggatgttggctcacctccagttttcatacaagaacctgctgatgtgtctatggaaattggctcaaatgtgacattaccttgtatgttcagggttatccagaaccaacaatcaaatggcgaagattagacaacatgccaattttctcaagacctttttcagttagttccatcagccaactaagaacaggagctctctttattttaagtaggttgaaggaaatatattttgtacgaatatgtacttttatgttatatatttatgttttatacataggtattgctatttaaaatagtatattaatcttgccaacacattttatgttcattgcattttactttgaaatagtactggcattttatattcgggaattgtcataaatgagttatattttattcaaatgtatgtcattaatttatcataagggcttatgaaacaatatgacttcttcatatcttaccatttcttattgcaaatagagtcatctgagcctttacatagataagtggtcacattaccttgattcttgtaacaattgttgtatagaaagataaaatattactattagttaactttatttattttgtcaaacagtacataacaacatagggatgccttggaatctcctttattaaaagctgtatccacctgaagcaaaagatccctgccacccccacaaaagtcaaatactttcttatctaaaaattttataagctattcagtattcagatatttggaagcaccttctattttttcaaataatgctaagaataattgcatggtgttaccagaggaggaaaagcatttagataattaattgcatttttaaaaataatgggatgtttggggtattttatagaaagcttttaatcagttactgctaagttaattattttaattatttttatttttatattttgggtgggtacgggttctcattctgttgcccaggctggagtgcagtggcatgaacttggctcactgcaaactccacctcacaggttcaagcaattgtcctgcttcagcctcctgagtagctgggattacagtgtgaaccaccatacccagctaatttttgtatttttggtagagatagggttttaccatgttggccaggctggtctcgaattcttgacctcaaatgatccacccacatcgtcttcccaaagtactgggattgctgtcgtgaaccaccatgtctggcccaagtttattaacaatattaaatatacattggccacttaaacttccagatataaattaaattgtctaataacaaaaaaaaaaaaaaaaagaaaaaa

SEQ ID NO: 154 - DNA, 507 bp, Homo sapiens
  SITE (449): n equals a,t,g, or c
  SITE (489): n equals a,t,g, or c
gcaggaattcggcagagctggacaagcccttttytcttctcacgtcccacctcgatgcactgccctgggagggggccccaagaccttagactggatgcctttgctgggccatgctattctcagacctcccgccttcacccccagggccccaratcgtgtcacatccatatgacacttggaatgtgacagggcaggatgtgatctttggctgtgaagtgtttgcctaccccatggcctccatcgagtggaggaaggatggcttggacatccagctgccaggggatgacccccacatctctgtgcagtttaggggtggaccccagaggtttgaggtgactggctggctgcagatccaggctgtgcgtcccagtgatgagggcacttaccgctgccttgcccgcaatgccctgggtaagtggaggcccctgctarcttgacagtgctcacanctgaccaactgaactctaaaagcatccccaagcttcgatnaactaaaactggttcctt

SEQ ID NO: 155 - DNA, 298 bp, Homo sapiens
tctggacgtttcatcacatattcccaggaaagcccagccaaatgcagctggcactgtgccaakcattgggctagrtgctgggaattgaaataataaactatttcctgatttctcttctctcttctggagaaagaattggattagaacaagcattgcagtgtcgagatggctatgaaccctgtgtaaatgaaggaatgtgtgttacctaccacaatggcacaggwtactgcaaatgtccagaaggcttcttgggggaatattgtcaacatcgagacccctgtgagaagaaccgctgcca

SEQ ID NO: 156 - DNA, 972 bp, Homo sapiens
  SITE (74): n equals a,t,g, or c
cagaggtgctggtggcgcggggagtgcgcgtcaaggtgaacgaggcctaccggttccgcgtggcactgcctgcntacccagcgtcgctcaccgacgtctccctggcgctgagcgagctgcgccccaacgactcaggtatctatcgctgtgaggtccagcacggcatcgatgacagcagcgacgctgtgggaggtcaaggtcaaaggggtcgtctttytctaccgagagggctctgcccgctatgctttctccttttctggggcccaggaggcctgtgcccgcattggagcccacatcgccaccccggagcagctctatgccgcctaccttgggggctatgagcaatgtgatgctggctggctgtcggatcagaccgtgaggtatcccatccagaccccacgagaggcctgttacggagacatggatggcttccccggggtccggaactatggtgtggtggacccggatgacctctatgatgtgtactgttatgctgaagacctaaatggagaactgttcctgggtgaccctccagagaagctgacattggaggaagcacgggcgtactgccaggagcggggtgcagagattgccaccacgggccaactgtatgcagcctgggatggtggcctggaccactgcagcccagggtggctagctgatggcagtgtgcgctaccccatcgtcacacccagccagcgctgtggtgggggcttgcctggtgtcaagactctcttcctcttccccaaccagactggcttccccaataagcacagccgcttcaacgtctactgcttccgagactcggcccagccttctgccatccctgaggcctccaacccagcctccaacccagcctctgatggactagaggctatcgtcacagtgacagagaccctggaggaactgcagctgcctcargaagcacagagagtgaatcccgtggggccatctactcatccccatcatgga

SEQ ID NO: 157 - DNA, 1635 bp, Homo sapiens
tcgagttttttttttttttttttttttttttttttcaaaatcaaactgctttactatactttattgatataaatacagcaaatctcaataagcaccagctaccattttaccactacacaagagaaacaaagtcaaaagaattatatattaatgcaaagagtaaacacagaatgctttcacttccactatagtcctctataacaaaacatcctacatactttgtacaatttgcttataattggttaaatatttgatatgaagcaaggttgatttttaatcaaacttctatttctcagtggaaaatgctctcttcatcagaggtggttgagttttcccgacatcaaacatcatttccaaaggtgggttattgagagaacaccaatcaggtatacggcccgtctgattataatattcctttgaaacagaacggctcccaagtatatcttgtaatgctccaaaaatagcccctcccaaccaggccacacaattagcttttgcaggtggagtatgaattcgaaatgtcttagtgccaagtgcttttttatattttggtttttctaccaaataccttatttctgcaagcaatctgtggagaaatcctggcaacatagaagtgccacctatgactaccaaattctctgctagttgcttcctggtgtctatcggacactgtataagggaatccaatattaaagtggcaactgattgctcttcattatcttgttcaaaaagaatttccacaactgaatctctgattgatccaaggatatgtaaaatcttctctccatctaatggatagtcaacatttgggggtggggagggacgctcattattcccatcaatattaaattttgctgcttggatttttagtcctcgcttcagatcacttacaaagcaagtacgcgctttaatgtcctctaagacaccttccggaactgaacccatcactgagggaaggctctgttctttagcaacacttgtgtcaacagtacattgttccaatagttgagtttccaactctttgtgaagagcttttcctcctaggggtagtgctccccaacaatttagaactgggattccttcatatatgggtaacaccaggctttccctatatccacaatctaggaccatggcagaattaattccaagcgtcagaagagccattagatgacttggagcaagcaagacagatggaacctcaaaatatttgaaaagaacacgagtgagtgtctctctgaagtgagaaggacataataccgattcgataatcacaactcggcggtctctgggattcaccaatagatgcctgaaatatagtatgtggatgaattcctttaggtaggaatataattcttctgtattgatattatactgaacaactctgacaggcttaggcatcccagctctttttatcacactaggaattatacatcttggaccagtttctccagcaaatccacacttggtaaaggcctctcccaggtcgatcacgaccgccgtcttctccccgccgctccccaggccctcgtagagcggcatggtagtaaggcagactgagagaagagggtcgcagtctccgcggccaacaagtcycggcgctcgcggggcggggccggggctccggcgctcgggcgc

SEQ ID NO: 158 - DNA, 877 bp, Homo sapiens
gaattcggcacgaggtggaatggttattccagtcatctctttatgaatcaaatgtgaggggctgctttgtggacggagtctttgcaagagcacatcaacgggaaagagaaagagacattcacttggagggctcttgctgaaaatgggtttaactctccttttgccagtcaccaccagcctgacctcatacacttttagtacaatggagtggctgagcctttgagcacaccaccattacatcatcgtggcaaattaaagaaggaggtgggaaaagaggacttattgttgtcatggcccatgagatgattggaactcaaattgttactgagaggttggtggctctgctggaaagtggaacggaaaaagtgctgctaattgatagccggccatttgtggaatacaatacatcccacattttggaagccattaatatcaactgctccaagcttatgaagcgaagttgcaacaggacaaagtgttaattacagagctcatccagcattcagcgaaacataaggttgacattgattgcatcagaaggttgtagtttacgatcaaagctcccaagatggtggctggctctcttcagcatgtaattggggaaaccctcgcgtctactaggggtgatacagatggtgattttaaagagcaaaactagacttctatgtgagaagtgctggaaaatgatttaggacatgtgtaaagttagatggaaagactgtaaatgtttaatatgaatatagtgttcttttgaagtaaggccagctgttgaacggttaaactgtgcatttctcattttgatgtgtcatgtatgttaatgtatgaaatgattaaataaaatcaaaactggtacctgtttatacataaaaaaaaaaaa

SEQ ID NO: 159 - DNA, 813 bp, Homo sapiens
gtgcggataacgtcacggtcgtgcagcgccatcagagaggcttcgtagctgtacttgtcgtgcatgtagtggatgatgttcagtgcagtgatgtactgtttagccagccagtccatgaagtgatccatgcgctccatcacttcatcatagttcaggacatcgcctttgatcggttcagacttcggaccaacctgcattttcagtttttcgtcaacgccgccgttgattgcgtacagcatggttttcgccaggtttgcacgcgcaccgaagaactgcatttgtttaccaacgatcatcgggcttacgcagcaagcaatagcgtagtcatcgttgttgaagtccggacgcatcaggtcatcgttctcatactgcagagaagaggtgtcgatggacatttagcggcgaatttcttgaagttcagcggcagtttttcagaccacagaatggtcatgttcggttccggagacggacccatggtgtacagggtgttcaggaaacggaagctgtttttggtaaccagggtacgaccgtcgaggcccataccaccgatagattcggttgcccagatcgggtcgccagagaacagttcatcgtattccggagtacgcaggaagcgaaccatacgcagtttcatgaccaggtggtcaaccatttcctgcgcttcttgttcggygatcttgccagctttcaggtcacgttcgatgtacacatccaggaaggtggaggtacgaccgaaggacattgcagcaccgttctgagacttaacagcagccaggtagccgaagtaagtccactggatagcttcctgagcgt

SEQ ID NO: 160 - DNA, 303 bp, Homo sapiens
ggcacgagtgatttttgccagtgacacttcagccaccacggtgtattcgctaaaggttgaacagcccatgtagtggaagattggctggccgttgtaagaaaaacgcgttgtcctatcaggcataacccctttgccctgcgtggcgcgaacggcgacacacagattggttttacctgatttacagaacaggcattcgccacattctgcagtgtaaagcggaataacgtgatcgcctggcacaacgctggtcacaccttcgcccacttctaccactatgccggcaccttcgtgtcccagcacggc

SEQ ID NO: 161 - DNA, 758 bp, Homo sapiens
ccacgcgtccgaggaggggcaggagggagcctggactttggaggatggggaaggcaggccagggcccggagtgggtgaagacttctcaggactaggccaggacagtgcccatccctgcagaagcccagtggccaattgaggcaggaggagctccagacaacagcatgtgaggcaggcgtggattttgtgtacaagacaaagctggaatctgtggaggtctctgcctccaacccttacgtctattacaacacgcagctcgaagacatcattaagagtggtacggaccctgccacacccctggccatgaagaaattcgtctcccatgccacttgccatgactccctggggttgcaagaacaggaatcgtacctcatcatgggccagacgtcagacctgtggagaatcaaatctgattacagctatgttctgggcaaggagacgttcctcatcctttggccagcagatggagatgccagcaagaaagaattgcgggaccaactggaggaatttttggaatatatgcgcacccacggctgccagtcctgagcctcttctgctttcagggaggtgtcatcaggcagctctgggccactgggtttaaccccaaataaagagcacaggatatgacacccaaaaaaaaaaaaaaaaaaaaaaaaaaaaaaaaaaaaaaaaaaaaaaaaaaaaaaaaaaaaaaaaaaaaaaaaaaaaaaaaaaaaaaaaaaaaaaaaaaaaaaaaaaaaaaaaaaaaaaaaaaaaaa

SEQ ID NO: 162 - DNA, 709 bp, Homo sapiens
ggcacgaggaggggctggctctggtagattgcaaatgacctgctttttttctgatcccgagctgcgttcggacccttgtcggatagtaaatcccagtaaggtacctgccgtgggcagatctgagctttcttcttggacaccccatacccacagtcctccaggccacccttaagtacaatgttctcctacctaagaaggcatctggattttctctttccttggaaatagtaaagaactactctttgactgtttttgacctcacagtgaacctcaaatacactggaattcgcaataaatccagtatggtggttatagatgtaaaaatgctatcaggatttactccaaccatgtcatccattgaagagcttgaaaacaagggccaagtgatgaagactgaagtcaagaatgaccatgttcttttctacttggaaaatgtttttggtcgagcagacagtttcactttttctgttgagcagagcaaccttgtgttcaacattcagccagccccaggcatggtctacgattactacgaaaaagatggagaagcatttcttttaacaaactgattcttctgtatcaaacctggaaaaaaatcatgaaccatctgacatcgtgaacagtctgcagtgggctatggtttcttgacaagtcttatttccttatcatcccattaaatgttgtcattttgcaaaaaaaaaaaaaaaaaaaa

SEQ ID NO: 163 - DNA, 2092 bp, Homo sapiens
ccacgcgtccgaatctgtctccctggagctcccagtggacattgttcctgactcgaccaaggcttatgttacggttctgggagacattatgggcacagccctgcagaacctggatggtctggtgcagatgcccagtggctgtggcgagcagaacatggtcttgtttgctcccatcatctatgtcttgcagtacctggagaaggcagggctgctgacggaggagatcaggtctcgggcagtgggtttcctggaaatagggtaccagaaggagctgatgtacaaacacagcaatggctcatacagtgcctttggggagcgagatggaaatggaaacacatggctgacagcgtttgtcacaaaatgctttggccaagctcagaaattcatcttcattgatcccaagaacatccaggatgctctcaagtggatggcaggaaaccagctccccagtggctgctatgccaacgtgggaaatctccttcacacagctatgaagggtggtgttgatgatgaggtctccttgactgcgtatgtcacagctgcattgctggagatgggaaaggatgtagatgacccaatggtgagtcagggtctatggtgtctcaagaattcggccacctccacgaccaacctctacacacaggccctgttggcttacattttctccctggctggggaaatggacatcagaaacattctccttaaacagttagatcaacaggctatcatctcaggagaatccatttactggagccagaaacctactccatcatcgaacgccagcccttggtctgagcctgcggctgtagatgtggaactcacagcatatgcattgttggcccagcttaccaagcccagcctgactcaaaaggagatagcgaaggccactagcatagtggcttggttggccaagcaacgcaatgcatatgggggcttctcttctactcaggatactgtagttgctctccaagctcttgccaaatatgccactaccgcctacgtgccatctgaggagatcaacctggttgtaaaatccactgagaatttccagcgcacattcaacatacagtcagttaacagattggtatttcagcaggataccctgcccaatgtccctggaatgtacacgttggaggcctcaggccagggctgtgtctatgtgcagacggtgttgagatacaatattctccctcccacaaatatgaagacctttagtcttagtgtggaaataggaaaagctagatgtgagcaaccgacttcacctcgatccttgactctcactattcacaccagttatgtggggagccgtagctcttccaatatggctattgtggaagtgaagatgctatctgggttcagtcccatggagggcaccaatcagttacttctccagcaacccctggtgaagaaggttgaatttggaactgacacacttaacatttacttggatgagctcattaagaacactcagacttacaccttcaccatcagccaaagtgtgctggtcaccaacttgaaaccagcaaccatcaaggtctatgactactacctaccagatgaacaggcaacaattcagtattctgatccctgtgaatgaggatctggctctgttgcccaggctgcagtgcagtggcgtgatctcagctcactgcagcctctgcctcccaagttcaagcgattcttgtgcctcagcctcctgagtagctgggatgacaggcacgtgccatcacgcccagctaattttttttgtatttttaatagagatggggtttcgccatgttggtcaggctggtctcaaactcctggcctcaggtgatccgcctacttcagcctcccaaagtgctgggattacaggtgtaagccactgtgcccggcctgtcctaaactcttgaaaatagtttacagaagaaaaagctaatgcttggtattaaaacaatacttttttctatcagattgaaaatggattgatttttcctgatatttttacatgatacatctttgttatatgaaaatactaagacaaaagtaaaggttacctgattctacacctgtgagataacactattaataatcaaaaaaaaaaaaaaaaaaa

SEQ ID NO: 164 - DNA, 821 bp, Homo sapiens
  SITE (58): n equals a,t,g, or c
  SITE (109): n equals a,t,g, or c
  SITE (325): n equals a,t,g, or c
  SITE (765): n equals a,t,g, or c
  SITE (769): n equals a,t,g, or c
  SITE (773): n equals a,t,g, or c
  SITE (808): n equals a,t,g, or c
caattatgtcacaccacagaagtaaggttccttcacaaagatcccaagctagcagatntcccagtcacgaacgttgtaaaacgacgggccagtgcctagcttataatangactcactatagggagagagctatgacgtcgcatgcacgcgtaarcttgggcccctcgagggatcctactagagcggccgccctttttttttttttttgagtttcagaataatgcagatgttttatttgaggggaaagcatcattcatatgtatccaagcaaaaggcagagcagttttacctttaaatgctaaaagtactggttggctctgtaggnccctcagaatcaaaaggaaactcctccacactttgtctctgtcttctccaggacccatatttcttggccactttcataacgtagtttttgaaagatgctcccataaaaacataaaggattgggttgaggcagctgtgaaagagtgcgatgctttctgtgacttggatggcgatgtccatgcgtttgctcatgttgcagctggtgatcagggagtagatgatgtctatggctcggcagaacttgacaatgttataaggcagttgagtgacaatgaaaactataacgactgtgagcagaacttttaggggkcgagatattttaatgtttggcatcttcatgagtgtcctttctgtgataaagtagcacacccccataataagaaaggggactacaaatccaatgcagatctctagcattgaatcaatgctttcattgatgtnccangtancgggggaaatgggatgacctagcattgtcattacnggataaaaccact

SEQ ID NO: 165 - DNA, 2827 bp, Homo sapiens
ccacgcgtccgcaaggagtgtatctacattttggaagctgctccacgtcaaagaatagagttgacctttgatgaacattattatatagaaccatcatttgagtgtcggtttgatcacttggaagttcgagatgggccatttggtttctctcctcttatagatcgttactgtggcgtgaaaagccctccattaattagatcaacagggagattcatgtggattaagtttagttctgatgaagagcttgaaggactgggatttcgagcaaaatattcatttattccagatccagactttacttacctaggaggtattttaaatcccattccagattgtcagttcgagctctcgggagctgatggaatagtgcgctctagtcaggtagaacaagaggagaaaacaaaaccaggccaagccgttgattgcatctggaccattaaagccactccaaaagctaagatttatttgaggttcctagattatcaaatggagcactcaaatgaatgcaagagaaacttcgttgcagtctatgatggaagcagttctattgaaaacctgaaggccaagttttgcagcactgtggccaatgatgtaatgcttaaaacaggaattggagtgattcgaatgtgggcagatgaaggtagtcggcttaacaggtttcgaatgctctttacttcctttgtggagcctccctgcacaagcagcactttcttttgccatagcaacatgtgcatcaataattctttagtctgtaatggtgtccaaaattgtgcatacccttgggatgaaaatcattgtaaagaaaagaaaaaagcaggagtatttgaacaaatcactaagactcatggaacaattattggcattacttcagggattgtcttggtccttctattatttctattttagtacaagtgaaacagcctcgaaaaaagtcatggcttgcaaaaccgcttttaataaaaccgggttccaagaagtgtttgatcctcctcattatgaactgttttcactaagggacaaagagatttctgcagacctggcagacttgtcggaagaattggacaactaccagaagatgcggcgctcctccaccgcctcccgctgcatccacgaccaccactgtgggtcgcaggcctccagcgtcaaacaaagcaggaccaacctcagttccatggaacttcctttccgaaatgactttgcacaaccacagccaatgaaaacatttaatagcaccttcaagaaaagtagttacactttcaaacagggacatgagtgccctgagcaggccctggaagaccgagtaatggaggagattccctgtgaaatttatgtcagggggcgagaagattctgcacaagcatccatatccattgacttctaatcttctgctaatggtgatgtgaattcttagggtgtgtacgtacgcagcctccagggcaccatactgtttccagcagccaacccttttctcccatcacaactacgaagaccttgatttaccgttaacctattgtatggtgatgtttttattctctcaggcagtctatatatgttaaaccaatcaaggaacttactctattcagtggaaacaataatcatctctattgcttggtgtcatttataggaagcactgccagttaaagagcattagaagaggtggttggatggagccaggctcaggctgcctcttcgttttagcaacaagaagactgctcttgactgataacagctctgtcaatattttgatgccacaataaacttgatttttctttacattccttttatttttcctttctctaaatttaatttgttttataagcctatcgttttaccatttcattttcttacataagtacaagtggttaatgtaccacatacttcagtataggcatttgttcttgagtgtgtcaaaatacagctagttactgtgccaattaagacccagttgtatttcacccatctgtttcttcttggctaatctctgtacttctgccttttaattactgggcccttattccttattttctgtgagaaataatagatgatatgatttattacctttcaattatatttttctcagttatactagaaaatttcataatcctgggatatatgtaccattgtcagctatgactaaaaatttgaaaaagataaaaatttctagcaagcctttgaagtttaccaagtatagtcacattcagtgacagcccattcattccagtaaagaatcatttcattcactttgggagaggcctataattacatttatttgcaatgtttctcttcgctagattgttacatagctcccattctgttggttttgcttacagcatatggtaaccaaggttagatgccagttaaaattccttagaaattggatgagccttgagattgcttcttaactgggacatgacatttttctagctcttatcaagaataacaacttccacttttttttaaactgcacttttgactttttttatggtataaaaacaataatttataaacataaaagctcattgtgttttttagacttttgatattatttgatactgtacaaactttattaaatcaagatgaaagacctacaggacagattcctttcagtgttcacatcagtggctttgtatgcaaatatgctgtgttggacctggacgctataacttattgtaaagaccttggaaatgtggacataagctctttctttccttttgttactgtatttagtttgtgataaatttttcactgtgtgatatttatgctctaaatcactacacaaatcccatattaaaatatacattgtacctgaaaaaaaaaaaaaaaaaaa

SEQ ID NO: 166 - DNA, 717 bp, Homo sapiens
  SITE (619): n equals a,t,g, or c
  SITE (625): n equals a,t,g, or c
  SITE (655): n equals a,t,g, or c
  SITE (673): n equals a,t,g, or c
  SITE (713): n equals a,t,g, or c
ctgccataagatggcgtccgtggcggctgcacgagcagttccygtgggcagtgggctcaggggcctgcaacggaccctacctcttgtagtgattctcggggccacgggcaccggcaaatccacgctggcgttgcagctaggccagcggctcggcggtgagatcgtcagcgctgactccatgcaggtctatgaaggcctagacatcatcaccaacaaggtttctgcccaagagcagagaatctgccggcaccacatgatcagctttgtggatcctcttgtgaccaattacacagtggtggacttcagaaatagagcaactgctctgattgaagatatatttgcccgagacaaaattcctattgttgtgggargaaccaattattacattgaatctctgctctggaaagttcttgtcaataccaagccccaggagatkggcactgagaaagtgattgaccgaaaagtggagcttgaaaaggaggatggtcttgtacttcacaaacgcctaagccaggtggacccagaaatggctgccaagctgcatccacatgacaaacgcaaagtggccaggagcttgcaagtttttgaagaaacaggaatctctcatagtgaatttctncatcgncaacataccggaagaaagtggtggtccccnttggaggtcctctgaagntctctaacccttggatccttttggcttcatgcttgaccangcaa

SEQ ID NO: 167 - DNA, 1559 bp, Homo sapiens
ggcacgagctcagccatgggagggagatggttccttctgcatgcttctctatctcctgatggctggtgctgagatgacaaatgcatctctctaggaactctgagcctcaccaccctggagactatgttgtttcttttcattagagctgtttctacatcctgtgctgagagccagctcttccacgcccatagaggggagtcccatgaccctgacctgtgagacccagctctctccacagaggccagatgtccagctgcaattctccctcttcagagatagccagaccctcggattgggctggagcaggtcccccagactccagatccctgccatgtggactgaagactcagggtcttactggtgtgaggtggagacagtgactcacagcatcaaaaaaaggagcctgagatctcagatacgtgtacagagtgagtgtctaaggggctgctcttccagagtcagagctggggagaggaaggccagtgatatctcctgcacccctaggatggtggacataacagagaggagtgtccagctattctggtaatcttctctctttaagctcaacgttggtctaacagccctagaacattttcttccacttgagtcaggtaatagtaattattgatcagttactgattgcccaaccctatggggttacagagatgtacaagatcggttctctcatgaatcaagagacaactagaagcacaactgaacacatgcagttttaagaggcccctgtggtgcttccatttggtaacctgaactcacaacaaaatagtccgaaaaggggaagatgaatatgaactgtaatagtcagagaaagacatggagacatggatgtaaatctggagaagtcttgaagaataggagaagggtttggattctattttgatcttcaaaacagaggatctccagtgttctcttttattttgtggtttattgatgcatcaaagattccttagagataaatgcatataaaatgtgaccagaaaacattggatttatggagattatggacttggtgcccacatttctcaaggatgggaatgttgtgggagtgagagggatgttgcttcctttataatcgtatacacaattaatttcttatttcctactttgggcttctgcctgctgcacctgctgctattggcctattmatggtagctccagccttccccttgaccttgatgtccctgccatcaggaccttcacatgccatcttgtgttcccccaggagtccctgtgtctaatgtgaatctagagatccggcccaccggagggcagctgattgaaggagaaaatatggtccttatttgctcagtagcccagggttcagggactgtcacattctcctggcacaaagaaggaagagtaagaagcctgggtagaaagacccagcgttccctgttggcagagctgcatgttctcaccgtgaaggagagtgatgcagggagatactactgtgcagctgataacgttcacagccccatcctcagcacgtggattcgagtcaccgtgagaagtaagttccgattcctttcacacagcctcga

SEQ ID NO: 168 - DNA, 2946 bp, Homo sapiens
ggtgctcgagtgtattgaaagaggagtggacttatttgagagttttttcccttatcaagtaacagagcggggatgtgccctgactttcagttttgattaccagccgaatcctgaagagacactactacaacaaaatggaacacaagaagaaataaaatgtatggatcaaataaagaaaattgaaacaactggttgcaaccaagaaataacatcatttgaaattaatctgaaggaaaaaaagtaccaggaggactttaacccgctggtgagaggatgttcctgttactgctgtaagaatcacactcgggcatacatccaccatctgctggtgaccaatgagctgctggccggagtcctgcttatgatgcacaactttgaacactactttgggtttttccattacatccgggaagcactaaaaagtgacaaactggcacagttgaaagagctcatccacaggcaagcatcttgagatcttgcaaatacaagtctcactcttcacactgagcctgtaccactgttgtaacatgggaagacgtgaagaagaaataatctgagctttaattatttatatttggacataaggtctgcttaaataaagaatctttgtaccaaactgcccacatgagggtgaagagatttcctcaaaagacttaaatgacctggattgatcagagagaattgaactgtgacctttaaaacttctagactaattcttttagttgatagagattcatttagtcaaagacaaaagctttaactgtgagggcacagccttgaagtgggagtgatgagattctgagggacccatgaattggattgaggcttgaggggaaatggtgtgagacgaatgggctctggacatatgcctgttgatttgagaagaaatctggctggtttgagggtttcctttagttcaccctcatactctcaggagactcttctggatacttttgtcttccaccctgccctggcagtgcagccaatcagaaatggctcttgtgacttaactgggcttggatatccctggaatgtggggcttgaacattgctcctgtgatgatcatctgtcccaggtcacactccttcatttgaccacatggcctatttgcaacttctttttagagccaatgtaattgcctgttaggagccagaagtttgcccagctgctttcttctggttgtacagatccattgtggtctgccttccaggctcattaatagtctaactacgtaataactgaagacctatctcttgtgaagattcattctcaatgtgttcacttggacagagccctgcctggcctaacgattagagggttagtctccatcctgctcagatatgactcctgggcaattcacttaacttctccatggctgcttcctgctgaataaatagggacaggcataatggataggaatgaatgaacttttaagatactgtctagctctaaaattggaagaacaaaaagttttagattagagtcatagccttaatagccctagttgtcatcctgggagacaggcaacagtagagatatttgagagcctaaagagaggtttggcctgtgggtttttaagtggttattgaattggtatcaggagatcctgaggctggtaggggaaggtaattctttctaagttacctctgtatttttcaagttttctataaggaatacacatacacccacatgcacacaccatagtttttatacaaacagcaataacaaaaccaaaaagatgcccctttttttgtagggataagaaatacatttgttttatacttctatgctatattttgctattcaaaatttagtgggcattacttaacattgtttctaattattttgtggctgctgtatgttttatgtgttgggagcccattgtattaggccgttcttggattgctataaagaaatacctgagactgggtaatttggttttttggttttttggggttttttttgagacggagccttgctctgtcgcccaggctggagtgcagtggcgcgatctcggctctatgcaacctccacctcctgggttcatgccattctcctgcctcagcctcccgagtagctgggactacaggcgcccgccaccatgcctggctaattttttatatttttagtagagatggggtttcaccgtatgagccaggatggtctcgatctcctgacctcatgatccacaagactgggtaatctgtaaagaaaagaggtttaattggctcatggctctgcaggctttacaggaagcatggtactggcatctgcttggtttctggggaggcctccggaagcttatagtcatggcagaaggtgaagggggagcaggcacatcacatgacaaaagcaggaacaagactcagagcaagaagtcacttatcaccaaggggatggcccaggccattcatgagggatccacctttgtgctccaaacacctcccaccaggccccacctccagtattggggattacatttcaacttgaggtttgggcgggaacaaatagtcaaattatattacccatctacatggttttctttttcttagtatgggagtgtccatgaataaattcatgggcatcctcataactcttccatgaatggcaaggggtacttatggaaaacagttttccaaagatctgattgttttgaaatgtgttagattggacttgttcaaatgttcatatttttgttctatgctaaatgcatcgttaggggagtagtggtaaatattccagaatccatatgaaattcatgagtttatttatgtctaaaacactgaaaactgtgtccaatatcgttcagtttcctgggtctttttcttattagcacatttgagaaaaatattcctttcctttattgtagtaaatctattaaaggcaatagccaataaaacatttttaattttaaaaaaaaaaaaaaaaaaaaaaaaaaaaaaaaaa

SEQ ID NO: 169 - DNA, 745 bp, Homo sapiens
  SITE (586): n equals a,t,g, or c
  SITE (689): n equals a,t,g, or c
  SITE (726): n equals a,t,g, or c
  SITE (728): n equals a,t,g, or c
  SITE (729): n equals a,t,g, or c
gtccagaaaaaagtggatcatgaattggatgacgtgtttggaaagtctgaccgtcccgctacagtagaagacctgaagaacttcgtattctggaatgtgtattaaaggagacctttcgcctttttcctctgtttcctttatttgcccgtagtgttagtgaagattgtgaagtggcaggttacagagttctaaaaggcactgaagccgtcatcattccctatgcattgcacagagatccgagatacttccccaaccccgaggagttccagcctgagcggttcttccccgagaatgcacaagggcgccatccatatgcctacgtgcccttctctgctggccccaggaactgtataggtcaaaagtttgctgtgatggaagaaaagaccattctttcgtgcatcctgaggcacttttggatagaatccaaccagaaaagagaagagcttggtctagaaggacagttgattcttcgtccaagtaatggcatctggatcaagttgaagaggagaaatgcagatgaacgctaactatattattgggttgtgcctttatcatgagaaaggtctttattttaagagatccttgncatttacaatttacagatcatgagttcaatatgcttgaatcccctagacctaatttttccttgatcccactgatcttgacatcaagtctaacaaagaaaaagntttgagttttggattttcttttttcttttttctttantnnttttttttgaaaccgg

SEQ ID NO: 170 - DNA, 2356 bp, Homo sapiens
  SITE (506): n equals a,t,g, or c
gacgaagcgtgcgcgctttggtaaccggctagaaatcccgcacgcgcgcctgcctcctctccccaggcctgagctgcccctcccactgcctttccttcttcccgcgagtcagaagcttcgcgagggcccagagaggcggtggggtgggcgaccctacgccagctccgggcgggagaaagcccaccctctcccgcgccccaggaaaccgccggcgttcggcgctgcgcagagccatggaattctcctggctggagacgcgctgggcgcggcccttttacctggcgttcgtgttctgcctggccctggggctgctgcaggccattaagctgtacctgcggaggcagcggctgctgcgggacctgcgccccttcccagcgccccccacccactggttccttgggcaccagaagtttattcaggatgataacatggagaagcttgaggaaattattgaaaaataccctcgtgccttccctttctggattgggccctttcaggcatttttntgtatctatgacccagactatgcaaagacacttctgagcagaacagatcccaagtcccagtacctgcagaaattctcacctccacttcttggaaaaggactagcggctctagacggacccaagtggttccagcatcgtcgcctactaactcctggattccattttaacatcctgaaagcatacattgaggtgatggctcattctgtgaaaatgatgctggataagtgggagaagatttgcagcactcaggacacaagcgtggaggtctatgagcacatcaactcgatgtctctggatataatcatgaaatgcgctttcagcaaggagaccaactgccagacaaacagcacccatgatccttatgcaaaagccatattgaactcagcaaawtcatatttcaccgcttgtacagtttgttgtatcacagtgacataattttcaaactcagccctcagggtraccgcttccagaagttaagccgagtgttgaatcagtacacagatacaataatccaggaaagaaagaaatccctccaggctggggtaaagcaggataacactccgaagaggaagtaccaggattttytggatattgtcctttctgccaaggatgaaagtggtagcagcttctcagatattgatgtacactctgaagtgagcacattcctgttggcaggacatgacaccttggcagcaagcatctcctggatcctttactgcctggctctgaaccctgagcatcaagagagatgccgggaggaggtcaggggcatcctgggggatgggtcttctatcacttgggaccagctgggtgagatgtcgtacaccacaatgtgcatcaaggagacgtgccgattgattcctgcagtcccgtccatttccagagatctcagcaagccacttaccttcccagatggatgcacattgcctgcagggatcaccgtggttcttagtatttggggtyttcaccacaaccctgctgtctggaaaaacccaaaggtctttgaccccttgaggttctctcaggagaattctgatcagagacacccctatgcctacttaccattctcagctggatcaaggaactgcattgggcaggagtttgccatgattgagttaaaggtaaccattgccttgattctgctccacttcagagtgactccagaccccaccaggcctcttactttcccaaccattttatcctcaagccmaagaatgggatgkatttgcacctgaagaaactctctgaatgktagatctcagggtacaatgattaaacgtactttgtttttcgaagttaaatttacagctaatgatccaagcagatagaaagggatcaatgtatggtgggaggattggaggttggtgggataggggtctctgtgaagagatccaaaatcatttctaggtacacagtgtgtcagctagatctgtttctatataactttgggagattttcagatcttttctgttaaactttcactactattaatgctgtatacaccaatagactttcatatattttctgttgtttttaaaatagttttcagaattatgcaagtaataagtgcatgtatgctcactgtcaaaaattcccaacactagaaaatcatgtagaataaaaattttaaatctcacttcacttagccgacattccatgccctgaccaatcctactgcttttcctaaaaacagaataatttggtgtgcattctttcagactttttcctatacattttatatgtagaaatgtagcaatgtatttgtatagatgtgatcattcctatattgttattgatttttttcacttaataaaaattcaccttattccttaaaaaaaaaaaaaaaaggg

SEQ ID NO: 171 - DNA, 406 bp, Homo sapiens
gtgaaagcagaaatgcaaaagcacggagaagaccccttctgccctttctccatcatcagcaatgccgtctctaacatcatttgctccttgtgctttggccagcgctttgattacactaatagtgagtycaagaaaatgcttggttttatgtcacgaggcctagaaatctgtctgaacagtcaagtcctcctggtcaacatatgcccttggctttattaccttccctttggaccatttaaggaattaagacaattgaaaaggatataaccagtttccttaaaaaaatcatcaaagaccatcaagagtctctggatagagagaaccctcagggacttcataggacatgtaccttytccacatgggaagaggagagggaaaaataatagtgaacaggcagttttggatg

SEQ ID NO: 172 - DNA, 737 bp, Homo sapiens
  SITE (1): n equals a,t,g, or c
  SITE (4): n equals a,t,g, or c
  SITE (5): n equals a,t,g, or c
  SITE (6): n equals a,t,g, or c
nttnnnatgmatcgccggctcgaaataaccctactaaagggaacaaaagctggagctccaccgcggtggcggccgctctagaactagtggatcccccgggctgcaggaattcggcacgagcaactcatggagcccccccgggcccatcgagtaccggactggctgaccccctagggttggcagtagcccctgaccctcagtatggccaacactaccggagagcctgaggaggtgagcggcgctctgtccccaccgtccgcatcagcttatgtgaagctggtactgctgggactgattatgtgcgtgagcctggcgggtaacgccatcttgtccctgctggtgctcaaggagcgtgccctgcacaaggctccttactacttcctgctggacctgtgcctggccgatggcatacgctctgccgtctgcttcccctttgtgctggcttctgtgcgccacggctcttcatggaccttcagtgcactcagctgcaagattgtggcctttatggccgtgctcttttgcttccatgcggccttcatgctgttctgcatcagcgtcacccgctacatggccatcgcccaccaccgcttctacgccaagcgcatgacactctggacatgcgcggctgtcatctgcatggcctggaccctgtctgtggccatggccttcccacctgtctttgacgtgggcacctycaagtttattcgggaggaggacaagtgcatctttgagcatcc

SEQ ID NO: 173 - DNA, 680 bp, Homo sapiens
gctgtgttgatggtgtggctggctatcgttgcacatgtgtgaaaggatttgtaggcctgcattgtgaaacagaagtcaatgaatgccagtcaaacccatgcttaaataatgcagtctgtgaagaccaggttgggggattcatgtgcaaatgcccacctggatttttgggtacccgatgtggaaagaacgtcgatgagtgtctcagtcagccatgcaaaaatggagctacctgtaaagacggtgccaatagcttcagatgcctgtgtgcagctggcttcacaggatcacactgtgaattgaacatcaatgaatgtcagtctaatccatgtagaaatcaggccacctgtgtggatgaattaaattcatacagttgtaaatgtcagccaggattttcaggcmaaaggtgtgaaacagaacagtctacaggctttaacctggattttgaagtttctggcatctatggatatgtcatgctagatggcatgctcccatctctccatgctctaacctgtaccttctggatgaaatcctctgacgacatgaactatggaacaccaatctcctatgcagttgataacggcagcgacaataccttgctcctgactgattataacggctgggttctttatgtgaatggcagggaaaagataacaaactgtccctcggtgaatgatggcaga

SEQ ID NO: 174 - DNA, 1593 bp, Homo sapiens
  SITE (4): n equals a,t,g, or c
  SITE (26): n equals a,t,g, or c
cagnaatttttttttttttttttttnaaactgctttactatactttattgatataaatacagcaaatctcaataagcaccagctaccattttaccactacacaagagaaacaaagtcaaaagaattatatattaatgcaaagagtaaacacagaatgctttcacttccactatagtcctctataacaaaacatcctacatactttgtacaatttgcttataattggttaaatatttgatatgaagcaaggttgatttttaatcaaacttctatttctcagtggaaaatgctctcttcatcagaggtggttgagttttcccgacatcaaacatcatttccaaaggtgggttattgagagaacaccaatcaggtatacggcccgtctgattataatattcctttgaaacagaacggctcccaagtatatcttgtaatgctccaaaaatagcccctcccaaccaggccacacaattagcttttgcaggtggagtatgaattcgaaatgtcttagtgccaagtgcttttttatattttggtttttctaccaaataccttatttctgcaagcaatctgtggagaaatcctggcaacatagaagtgccacctatgactaccaaattctctgctagttgcttcctggtgtctatcggacactgtataagggaatccaatattaaagtggcaactgattgctcttcattatcttgttcaaaaagaatttccacaactgaatctctgattgatccaaggatatgtaaaatcttctctccatctaatggatagtcaacatttgggggtggggagggacgctcattattcccatcaatattaaattttgctgcttggatttttagtcctcgcttcagatcacttacaaagcaagtacgcgctttaatgtcctctaagacaccttccggaactgaacccatcactgagggaaggctctgttctttagcaacacttgtgtcaacagtacattgttccaatagttgagtttccaactctttgtgaagagcttttcctcctaggggtagtgctccccaacaatttagaactgggattccttcatatatgggtaacaccaggctttccctatatccacaatctaggaccatggcagaattaattccaagcgtcagaagagccattagatgacttggagcaagcaagacagatggaacctcaaaatatttgaaaagaacacgagtgagtgtctctctgaagtgagaaggacataataccgattcgataatcacaactcggcggtctctgggattcaccaatagatgcctgaaatatagtatgtggatgaattcctttaggtaggaatataattcttctgtattgatattatactgaacaactctgacaggcttaggcatcccagctctttttatcacactaggaattatacatcttggaccagtttctccagcaaatccacacttggtaaaggcctctcccaggtcgatcacgaccgccgtcttctccccgccgctccccaggccctcgtagagcggcatggtagtaaggcagactgagagaagagggtcgcagtctccgcggccaacaagtcccggcgctcgcggggcc

SEQ ID NO: 175 - DNA, 772 bp, Homo sapiens
  SITE (685): n equals a,t,g, or c
gggagcgcggtggggctaggcgtggggcgctcccggcatgtccctgtaccgcagcgtcgtgtggttcgccaaggggctgcgcgagtacaccaagagtggctatgaatctgcatgtaaagactttgtccctcatgacttggaggtccagattcctggaagagtctttttggtcactggaggaaacagcggcattggcaaagaactgcccttgaaatcgccaagcgaggtggcacagttcacctggtttgtcgagatcaagccccagcagaagatgccaggggtgagatcatccgggagagcggtaaccagaacatttttctgcacattgtggacttgtctgatcccaagcaaatctggaaatttgttgaaaatttcaagcaggaacataaactccatgttctgatcaataatgcaggttgcatggtcaataaaagaragctcacagaaratggacttgraaaaaactttgctgccaatactctgggtgtgtacattytcacgaccggsctgatccytgtgctggagaaagaacacsacccccgagtgataacccgtctcctcaggaggaatgttggttcagaaacttgaacaccaatgatctccagtccgaaagaacaccatttgatggaactatggtctatgcacaaaacaagggcgcccacattgtctgtaaggctgccagcancctccgccttccttggtcgctgctgtgtgccttccgaggtggccctgtctgagactctctgcactccaacttcttctggtttaaatt

SEQ ID NO: 176 - DNA, 1087 bp, Homo sapiens
  SITE (1069): n equals a,t,g, or c
tgtcgagatcaagccccagcagaagatgccaggggtgagatcatccgggagrgcggtaaccagaacatttttctgcacattgtggacttgtctgatcccaagmaaatctggaaatttgttgaaaatttcaagcaggaacataaactccatgttctgatcaataatgcaggttgcatggtcaataaaagagagctcacagaagatggacttgaaaaaaactttgctgccaatactctgggtgtgtacattctcacgaccggcctgatccctgtgctggagaaagaacacgacccccgagtgaagggacttggcagctgcagttcagttcaaggccttgggatgagaagcgtgtcctggagtatccagataaccgtctcctcaggaggaatgttggttcagaaactgaacaccaatgatctccagtccgaaagaacaccatttgatggaactatggtctatgcacaaaacaagaggcagcaagtggttctgacggagcggtgggcccaagggcacccggccatccatttttcttccatgcatcctggctgggccgacaccccaggtgtgaggcaggcgatgccggggttccacgccaggttcggggaccgcctgcgctccgaggcccagggcgcggacaccatgctgtggctggccctctcctctgccgcagccgcacagcccagcggccgcttctttcaaggtgacttcctccctggctgtgaaggcagctgacacagggctaggggcagcagctgggccttcgaggcgcaccttyccctycgtgaaacctggggtggactgtcccctgggggrtgctggcttctttggcgagatgattgctttgcctgctgaggttagttttgggaagcgcttcactccaggttggtagcttctttggagacttgtgataaccctgtcatcaaggtcctgtgagaacgggagaggcagttcctaccttgggaatggaagattttctctgcagtttgctgaggcccaggaggggcgctattcaaagctgcactgcaaagggagtaacggactctgcttctttgaatgccaaaggtgtaanggactctgcttctctatt

SEQ ID NO: 177 - DNA, 753 bp, Homo sapiens
ggcacgagttgcggcagacactttaccaaatcctacaatttgctcatccatgagaggacccacacggacgagaggccgtacacgtgtgacatctgccacaaggccttccggaggcaagatcacctgcgggatcacagatacatccattccaaagaaaaacccttcaaatgtcaggagtgtgggaaaggattttgtcagtctagaactctagcagttcacaaaactttacacatgcagacatcaagccctacagctgcgagcagtgcggcaaagtgttcaggcgaaactgtgatctgcggcggcacagcctgactcacaccccgcggcaggacttctagagaagcccaggatctgtcccgtgccgccgctgctcccctccccagacacctctccacgtctcctacccagggggtcgcatccctagcccttcactgaccccagctcttcccttgctgcagccgcacctgcagctccagggagttaactcttcttctgggggactgagaactgtagaaagccacacactactacatcccttcacaaagagtatatgctagtttcttgtagatattcacagctcattttagagctctgtacataatgttgtgggtctttgttttgttgttttgtttgctttgggatcttgttggatgcacttagatatggaaaatggaagccaaattttatctttaaagactgtattttcaaaataaaactttttcttgtttgtttcaaaaaaaaaaaaaaaaaaaa

SEQ ID NO: 178 - DNA, 873 bp, Homo sapiens
ggcacgagagcaagctgagcccaggactgggtagccccatctcgggcctcagtaaattgactccggacagaaagccctctcgaggaaggttgccctccaaaacgaaaaaagagtttatctgcaagttttgcggcagacactttaccaaatcctacaatttgctcatccatgagaggacccacacggacgagaggccgtacacgtgtgacatctgccacaaggccttccggaggcaagatcacctgcgggatcacagatacatccattccaaagaaaaacccttcaaatgtcaggagtgtgggaaaggattttgtcagtctagaactctagcagttcacaaaactttacacatgcagacatcaagccctacagctgcgagcagtgcggcaaagtgttcaggcgaaactgtgatctgcggcggcacagcctgactcacaccccgcggcaggacttctagagaagcccaggatctgtcccgtgccgccgctgctcccctccccagacacctctccacgtctcctacccagggggtcgcatccctagcccttcactgaccccagctcttcccttgctgcagccgcacctgcagctccagggagttaactcttcttctgggggactgagaactgtagaaagccacacactactacatcccttcacaaagagtatatgctagtttcttgtagatattcacagctcattttagagctctgtacataatgttgtgggtctttgttttgttgttttgtttgctttgggatcttgttggatgcacttagatatggaaaatggaagccaaattttatctttaaagactgtattttcaaaataaaactttttcttgttttgtttcaaaaaaaaaaaaaaaaaaaa

SEQ ID NO: 179 - DNA, 443 bp, Homo sapiens
  SITE (407): n equals a,t,g, or c
  SITE (426): n equals a,t,g, or c
ggcgtggggtgccaagcgcctgcgatgggggtcctaagagccacggggggaagaggggcaggctctccgtccctgcctcgcggggggtgcctctccccgctgtgatgggggtcctaatagccagggggcgcagaggggctggctctcaagtccccgcctcgtgtggggtgcctccctcaccagcaatggggctcctaagagccaggggggaagaggggctggctccggtacattgcaaatgacctgctttttttctgatcccgagctgcgttcagacccctgtcggatagtaaatcccaagtaaggsacctgccgtcggmagatctgagctttcttcttggacacctaaaacccacagtcctccagcagtgaaggatccagtgagattttccaggttaacgggcatnccggctactggtccaacgntcagaagtaacacaggc

SEQ ID NO: 180 - DNA, 1446 bp, Homo sapiens
  SITE (1446): n equals a,t,g, or c
gggcaagaggaggcctcctgacctttcacactgcctttttaatattaagatgaagtcacactccacaactttcttccagccaggcccagacatgtccgtccttgtaagttaaaagcttccatgggagccttccttcctaatcaagatgcaaataatacggcactccgaacagacactaaaaacagctctcatctcaaagaacccagtgcttgtatcacagtatgagaaattagatgctggggaacaacgtttaatgaatgaagccttccagccagccagtgatctctttggacccattaccttgcattctccatcagattggatcacctcccaccctgaggctccccaagactttgaacagttcttcagtgatccttacagaaagacaccctctccaaacaaacgcagcatttatatacagtccattggctctctaggaaacaccagaattatcagtgaagaatatattaaatggctcacgggctactgtaaagcatatttctatggcttgagagtaaaactcctagaaccagttcctgtttctgtaacaagatgttcctttagagtcaatgagaacacacacaacctacaaattcatgcaggggacatcctgaagttcttgaaaaagaagaaacctgaagatgccttctgtgttgtgggaataacaatgattgatctttacccaagagactcgtggaattttgtctttggacaggcctctttgacagatggtgtggggatattcagctttgccaggtatggcagtgatttttatagcatgcactataaaggcaaagtgaagaagctcaagaaaacatcttcaagtgactattcaattttcgacaactattatattccagaaataactagtgttttactacttcgatcctgtaagactttaacccatgagatcggacacatatttggactgcgacactgccagtggcttgcatgcctcatgcaaggctccaaccacttggaagaagctgaccggcgccctctaaacctttgccctatctgtttgcacaagttgcagtgtgctgttggcttcagcattgtagaaagatacaaagcactggtgaggtggattgatgatgaatcttctgacacacctggagcaactccagaacacagtcacgaggataatgggaatttaccgaaacccgtggaagcctttaaggaatggaaagagtggataataaaatgcctggctgttctccaaaaatgaggaccttcaaataggagtgattgaaataaataactacttgcatgttatgctttcatttgggtggaatacttcattggaataaactactgatcttgtgctgtgtcaaagtaacagactagaaccttctttcaagtacctgaattgaaatgaaactcattttgaataataaaaactctagaaactcttaaaaaaaaaaaaaaaaaaaraaaaaattgaan

SEQ ID NO: 181 - DNA, 2547 bp, Homo sapiens
ggcacgaggggaagaacacagtggttgccatagctgtatggtctcacttcagcaccttccctttggaagtgtacatccggcggctcaggaacatccgtcgagcagtggttcggctcctcgatcgaagcccaaagaccgtggtggtcatccggacggccaacgcccaagagctgggacctgaggtgagccttttcaacagcgactggtacaactttcagctggacaccatccttcggaggatgttctcaggggttggagtatatctcgtcgatgcctgggagatgaccctggcccattatctaccgcacaagctgcatccagatgaagttattgtgaagaaccagctggacatgttcttgtcctttgtgtgccccttggaaacctagcctgtcttggaagggactggaggaatcatattcaatgaccttctcaattgacctgagttacagaaagtggccccagtgagagatgactgcccttaataagtataaaatttcaaaaagatctggacttaatatgatgacttataaggagcttagaaaatgcaggttacatttatatctacctataggattttatccaatgttgacttagccatggtagaactcttaactgcatctacacactatattgctcttgtaaccaaagatgctaatgagtgtatttgaattagcttctcctaggaggggtgactactttgctaaagagtatgaaaaatgttttgatggaagggacaagtttggttggtagtagagtgtttgtagcttatctggtaaaggaaattgagtgcatctgcatgcatagcacaagtaatccatcttctggcggttaactagagaaagcttatagtcagaggctcttgtgaatgcactgaagactgctgtgtctcaggagtttctcttgatgatctaccttttctgaattacttgaaaaggccaatgtgcttggttcgagttttttagtgaatatttacaatttcctgcttttatctagaaaagaagcaaaagggaaatatgaaagcagtatatataaaatctgtgctttggaattgatatttgcatttggtgattgttttttatttgattcagctaaattttatgtgttgaatacttactctagaataactacttttggaactggaagggggaaatctgtaaatggaaatttatttttatgttctgaaatttgagggtttaggaattgacttttgtgtaaagaatgctacggtattataaagctgtggaagttttttccactagtttcaggtgttttttttttttttgttgttgttgttattttgaactacttaccaaaattagaagttaaaatctaattagaaattaataagatactaaaattcatgacagttttttgtttgtttgtttgtttgttttttggtatttcttgatttgggcataaaaggcacacccattctctcatgcttggaagaagctgctattcctactggctatctaagaagaatggaattattaattttatttgacttattaattttaaacgagtttaatttgggatcatttagtaagtactcttttctttttgagctgtgatagattatagtctagtttaagttgctcctaagtagacagatgaagaaactagggaggctttagagaggaagacagatgcttgaagtatgaacaatatatacccttagaagaatgggtcaaataatttgggtttttaatttaaaataggagggccccagatcttactttcctgtccttgaggaacaccttcaagtttttaaagtattttagggggaaagaagatttttaattgtttctgagcctaatgaggtaataaaatatattaaaatagtttaattttaatggtccttacgctttacagtacctaaggatcacttgtagtatctgacaaaaatgcagaattaaagagtcatggcagggtgtggtagctcaagcctgtaatcccagcactttgggaggccaggcaggaggattgcttgaggccaggagtttgagaccagcctgggcaacatagtaagacctcatctctacaaaaaataaaaaattatccaggtgtgggccgacagtcccagctactagggaggctaaggcagggtgattgattgagcccagtagtttgaggctgcagtgagttatgattgcgccactacactcccacttgggcaacagacaagagatcttatctctaaaaaatttttgttaaataataaaagaattaaggccagggatgttggctcacatctgtaatcccagcagggattatagtctcgggaggctgaggtgggcggattgcttgagcccggaaggtcaagaccagcctgggtgccatggtgaaaccccatctctacaaaaaaatacaaaaactagctgggtgtggtggcaccacctgtagtccccgctacttaagaggctgaggtgggaggattgcttgagcccaggaggcagaaggttgcagaggttgcagtgagccttgattgtgccactgtactccagtctgggcaacagggcaagaccctgtctctaaaaaaaaaaaaaa

SEQ ID NO: 182 - DNA, 997 bp, Homo sapiens
gcacaacgatgggctgggcaatgcctttgatggcccagggggcgccctggcgcacgccttcctgccccgccgcggcgaagcgcacttcgaccaagatgagcgctggtccctgagccgccgccgcgggcgcaacctgttcgtggtgctggcgcacgagatcggtcacacgcttggcctcacccactcgcccgcgccgcgcgcgctcatggcgccctactacaagaggctgggccgcgacgcgctgctcagctgggacgacgtgctggccgtgcagagcctgtatgggaagcccctagggggctcagtggccgtccagctcccaggaaagctgttcactgactttgagacctgggactcctacagcccccaaggaaggcgccctgaaacgcagggccctaaatactgccactcttccttcgatgccatcactgtagacaggcaacagcaactgtacatttttaaagggagccatttctgggaggtggcagctgatggcaacgtctcagagccccgtccactgcaggaaagatgggtcgggctgccccccaacattgaggctgcggcagtgtcattgaatgatggagatttctacttcttcaaagggtgcccgctactacgtgctggcccgagggggactgcaagtggagccctactacccccgaagtctgcaggactggggaggcatccctgaggaggtcagcggcgccctgccgaggcccgatggctccatcatcttcttccgagatgaccgctactggcgcctcgaccaggccaaactgcaggcaaccacctcgggccgctgggccaccgagctgccctggatgggctgctggcatgccaactcggggagcgccctgttctgaaggcacctcctcacctcagaaactggtggtgctctcagggcaaaatcatgttccccacccccggggcagaacccctcttagaagcctctgagtccctctgcagaagaccgggcagcaaagcctccatctggaaa

SEQ ID NO: 183 - DNA, 751 bp, Homo sapiens
  SITE (1): n equals a,t,g, or c
  SITE (7): n equals a,t,g, or c
  SITE (10): n equals a,t,g, or c
  SITE (17): n equals a,t,g, or c
  SITE (19): n equals a,t,g, or c
ngaggtntancgccccntncgtatgcccctccgggattaaagctggagctccccgcggtggcggccgctctagaactagtggatcccccgggctgcagggaaaaagaaaaaaagaaaaaaatcagcaatttatagaaagaagctatagtctgtcgggatatccaacaccaacagatattctgatggcaaaacaagtggaagaaaagaggaagcatgactgcagatcagatcagttctctttgtggattatattttcagtaaaatgtatggatctatcttttccttgttcttatatctagatcatgagacttgactgaggctgtatccttatcctccatccatctatggcgaactatagccatgcagctgacaacattttgcaaaatctctcgcctctaacagcctttctgaaactgacttccttgggtttcataataggagtcagcgtggtgggcaacctcctgatctccattttgctagtgaaagataagaccttgcatagagcaccttactacttcctgttggatctttgctgttcagatatcctcagatctgcaatttgkttcccatttgkgktcaactctgtcaaaaatggctctacctggacttatgggactctgacttgcaaagtgawtgcctttctgggggktttgkcctgkttccacactgctttcatgctcttctgcatcagkgtcaccagatacttratwtcgcccatyaccgcttctatacaaagaggctgrcctttaaa

SEQ ID NO: 184 - DNA, 941 bp, Homo sapiens
ccacgcgtccgcccacgcgtccggggtggcacatatacattgagggacctgaaagagaagtgattgtggacgatcagcaatcctgtgacattaacatgtgatgccactgggatcccacctcccacgatagcatggttaaagaaccacaagcgcatagaaaattctgactcactggaagttcgtattttgtctggaggtagcaaactccagattgcccggtctcagcattcagatagtggaaactatacatgtattgcttcaaatatggagggaaaagcccagaaatattactttctttcaattcaagttcctccaagtgttgctggtgctgaaattccaagtgatgtcagtgtccttctaggagaaaatgttgagctggtctgcaatgcaaatggcattcctactccacttattcaatggcttaaagatggaaagcccatagctagtggtgaaacagaaagaatccgagtgagtgcaaatggcagcacattaaacatttatggagctcttacatctgacacggggaaatacacatgtgttgctactaatcccgctggagaagaagaccgaatttttaacttgaatgtctatgttacacctacaattaggggtaataaagatgaagcagagaaactaatgactttagtggatacttcaataaatattgaatgcagagccacagggacgcctccaccacagataaactggctgaagaatggacttcctctgcctctctcctcccatatccggttactggcagcaggacaagttatcaggattgtgagagctcaggtgtctgatgtcgctgtgtatacttgtgtggcctccaacagagctggggtggataataagcattacaatcttcaagtgtttgcacctcgaaaaaaaaaaaaaaaaaaaaaaaaaaaaaaaaaaaaaaaaaaaaaaaaaaaaaaaaaaaa

SEQ ID NO: 185 - DNA, 7439 bp, Homo sapiens
  SITE (11): n equals a,t,g, or c
  SITE (12): n equals a,t,g, or c
  SITE (15): n equals a,t,g, or c
  SITE (3607): n equals a,t,g, or c
ccttttagctnntgnaaaaggctatttaggtgacactatagaaggtacgcctgcaggtaccggtccggaattcccgggtcgacccacgcgtccgcccacgcgtccgyyyacgcgtccgcccacgcgtccgggctggccctgggcatgggccagggcctcaaagcctggccacggtaccgggttgtgggctccgcagacgctgggcagtacaacctggagatcacagatgctgagctctctgacgacgcctcttacgagtgccaggccacggaggccgccctgcgctctcggcgggccaaactcaccgtgctcatccccccagaggacaccaggattgacggaggccctgtgattctactgcaggcaggcaccccccacaacctcacatgccgggccttcaatgcgaagcctgctgccaccatcatctggttccgggacgggacgcagcaggagggcgctgtggccagcacggaattgctgaaggatgggaagagggagaccaccgtgagccaactgcttattaaccccacggacctggacatagggcgtgtcttcacttgccgaagcatgaacgaagccatccctagtggcaaggagacttccatcgagctggatgtgcaccaccctcctacagtgaccctgtccattgagccacagacggtgcaggagggtgagcgtgttgtctttacctgccaggccacagccaaccccgagatcttgggctacaggtgggccaaagggggtttcttgattgaagacgcccacgagagtcgctatgagacaaatgtggattattcctttttcacggagcctgtgtcttgtgaggttcacaacaaagtgggaagcaccaatgtcagcactttagtaaatgtccactttgctccccggattgtagttgaccccaaacccacaaccacagacattggctctgatgtgacccttacctgtgtctgggttgggaatccccccctcactctcacctggaccaaaaaggactcaaatatggggcccaggcctcctggctccccacccgaggctgctctctctgcccaggtcctgagtaacagcaaccagctgctgctgaagtcggtgactcaggcagacgctggcacctacacctgccgggccatcgtgcctcgaatcggagtggctgagcgggaggtgccgctctatgtgaacgggccccccatcatctccagtgaggcagtgcagtatgctgtgaggggtgacggtggcaaggtggagtgtttcattgggagcacaccacccccagaccgcatagcatgggcctggaaggagaacttcttggaggtggggaccctggaacgctatacagtggagaggaccaactcaggcagtggggtgctatccacgctcaccatcaacaatgtcatggaggccgactttcagactcactacaactgcaccgcctggaacagcttcgggccaggcacagccatcatccagctggaagagcgagaggtgttacctgtgggcatcatagctggggccaccatcggcgcgagcatcctgctcatcttcttcttcatcgccttggtattcttcctctaccggcgccgcaaaggcagtcgcaaagacgtgaccctgaggaagctggatatcaaggtggagacagtgaaccgagagccacttacgatgcattctgaccgggaggatgacaccgccagcgtctccacagcaacccgggtcatgaaggccatctactcgtcgtttaaggatgatgtggatctgaagcaggacctgcgctgcgacaccatcgacacccgggaggagtatgagatgaaggaccccaccaatggctactacaacgtgcgtgcccatgaagaccgcccgtcttccagggcagtgctctatgctgactaccgtgcccctggccctgcccgcttcgacggccgcccctcatcccgtctctcccactccagcggctatgcccagctcaacacctatagccggggccctgcctctgactatggccctgagcccacaccccctggccctgctgccccagctggcactgacacaaccagccagctgtcctacgagaactatgagaagttcaactcccatcccttccctggggcagctgggtaccccacctaccgactgggctacccccaggccccaccctctggcctggagcggaccccatatgaggcgtatgaccccattggcaagtacgccacagccactcgattctcctacacctcccagcactcggactacggccagcgattccagcagcgcatgcagactcacgtgtaggggccagagcctggctggggcatctctgcggggcagaggagaaggctttcacagctgttccctgatattcaggggcattgctcattgctcccttctcggaccagccttcttcctcccaccatggcaggtggggagcaggtctcccagaaacaccccgtcccgaggatggtgctctgtgcatgccccagcctcctgggcctgcccttccctcttcttcgggaggatgtgtctcttctgacctgcactcttgcctgaccctagaatggggacagggaaagtgaaggttagggaaagcagaggggggcactttttagcattccctttctatcccacccctctgatctcccataagtggaaatgggggtacccagggatgggcaggctttggcctagggacatgaagtatgggagtgggtggctgtggcacagacaggtggaaaacgggatagcctggccagtccctctgttgtctgcattcgtgccctgggtgcctctctccttcctcagggtactgcagaagggagcgaacagggtactgttcgctcttgtctacagaacagccctggcactgcattcaaatccagtcttcattcagctgggatcaaaatgccagtcaccttggctacccactgtggacagctgtctgtcagcatgcagagggatccaggaatccccccggcagcacggcccgctttccttctcctccatgctgggccagccagataagtcagggtcctggtggagaaagaaaggctaggaccatgtcctcattgacccagatactgctgtgtgctgcacagcagtgaaccaacactagagggagccacacaagcctcctctccccagtctgccccacttcctggctttaactcttgagctggtttggggagtggtgaggtaggggtgggggtgctgtaggctctttttcaaagaaaacaaaaaacaatgaaaacctcatttgggaagaaaagctgtagggattcccccacccaaatacaagtcccagtggaaaggaaaggtagtacctattcttctccatggggttcctaacaccctccattactctttcagtctccaagcactttgaatccatttttaaacattcaggttgccagacctgtcacacagtggactctgatagggttacggagggggcctggctctcagtctctactctcctatgtcccatcagttggttggaggccaccttccagggggtatgggagacaggttttggtttttaagtgtcttttttttttttcttggaccaatcagattccttcttccactttcagtgccttgagtgtcaagctttggatgaccnccctatgtgggcggttgtgtggggagtgggtacttgtgagcctcggacacactgttaagtgttacagtgttaggagagagaygggtgaggggacctggagaggtaaggggcctggaaatggccctgacagagaacttgtgctgaccgggagaaggtggtgcggaagggcaccgcaggcattacacaggccatttctcctcctccatgtgcacgcacatccaacacacaccttccatgtgactgcttctcagccaccactttctgaccaaagagaacaggcgctccaaggagaacctgtacccctgccccagcctcgccttcctaaaaagcagtgtctggagttggctgtttcccgcctccccagctgcatgtccagcccagtgggagacagggcctctggtgcagttcccaaaatgttcctcgccctttctccgtggtcaccattcataattcatgttcgctttaatgagttacatgcttatcagccacaggccattaccacccttatggatgggtctggggggcgacattcctggccaaccccttgtaggaaggaccagataatacccaggaagcaagtagctctaattttaacttcacaggaagtctgtgcatcctccttcatttcagcagggaaaactcctgtggagtgggccctatctggggcatttacaggcttccagctgtattccatccctggaagctgatacctttctatagagtccttttatgagagctcagtgggaaggtctgtcaagaaattcaggttcttgtacagacaaattcatgcaaatttctattattttcacaaaaaccagaaaccatgggggaatccaaagacttgaagtctaaagatggtggcttttaaaacatgcatattccaaaaagaattcatttttgttttgggtttggctagattctcttatttatccccttttagcttaagtattagtttcattctactgaaatgatggagagagggcctaaggttactaggtaattgagctgatggtgcagggagaattgttgagaaaggaagcctagtttccagaagcctgacacagagctacttcactgtcctctactccttaacaaggtaactggagcctcttgggtgtcaaacaagcaccctggaaggcacagggaagcatcagcaaccaaggtagtctctgccctctgtaacttacgtgttggtgcatcagaatctgaattggaacctacctgatgggcccagtggaatagcttttctggggagtggaaggcgtccttgatcacagagctttgctgtcgaatcctggagtcctgcaacatggtgatgcctcagtagttggtgatcctgatcacctttggtggcttgttttagtggaaagagcaagggactaaaggtcaggagacccaggacccagtcctgaagctgcaaaggttagatctcggcctaactttctgttcattgcccccaatttgtctggcctgtaaaatgaagggggagggttgcataaacctaaaactattctggttttgttatacccatagggttgggggtagggatgggactgcccattgctggcaaggaactgggaacagtagcaagcatggtgagggctggagagctggctgggggggttctctcctgttcaaagaagctttcaccatgggcttcattatcttgtcagaagtgaattagtttccaccagggacccctttatcccaaacagcaacacaaaatacaccctaaacctcagagtaaaattgatgtggggctatcctttggctatcgggtcatctgtgctgctccccactcatttctgatgggtttgcaaaggtgccttttgccagggcaggacatagtatgcacatagggatattgttatgtgcctaggtttcaggcactccttctgtaggggaaaatgggaggagccttcctccaccctgatccttaggaacattcctctggcccagggacagcttgttcttctcaccaaacaggtgaagcctgcagtccaaggtgcctggagccagaggtcggggagtaagcacagctgcccctgcctgagaaggagcagcttgcaaggggagccggtggagggaaaggggtacaacagctttggaatacattctggatcttgaggaggatcttgtgattttggctgagccacggtcacttccctcgtgaaggacccgccctatatcctaaattctggatccctcaaagtccagccacagagtttgcatgaagcaaaaagcctagtaagtgagaaaggaaaggggccagggatgggagcagtgctgtgctgttatcactgtcttgcttggaatgaaaacatctgagcaccctgtcttcaagcggtacgctctccccttattccagcagggctactttcctcttcactctgatgaggggagctttatctgctttcaaaatggagcacgtcgcactggagtttcgtgccctctcgttaacctgtcaggagccacagggctccataaaacggaatcagtgtctcaatatacatgacctatgttcatagcaatgttcagccatttgggtttgaagaaaaccacattaaagccaagacccgtttggagcgaactgccttgttctttgctgtgtggaaggttctgtccctactgctgaactccagttcctccccaagcaccctggcctcagaaatcctggcttccccaagttagtgctgtctgacctgagccaggccactgcttggtgcctctacaggccactgtgcatgttgagaattgcccaaaaggattagtgaagctcctgaccctggcgaggccataatgaacactgaagtgcacaggccaagggatgtaattgaaaggcatttatttttgtgaagatgctrtaaaattagcatttaaatatcccattcccttctcttggcctcctcctatccccctatggtatttctcctcctctcctcaaggccaggctttttgtgaaaggcattggctcatctttgtcagcgtggtcctgacgttcacctctgggctgctggagaggactgagagatgtgtggtttggtaggaagggggtgtgtgtgggggttagtggggaatcccatttttttgcatcactgtgaggtagcttcaggccctgtccctggagaaataattgctgcgcagaagtcacaggccatactgggcagttctggtacaaacctgcccttattaataataacaataataataataactccatttgcatagaactgtcactcattcctgccagtctgctgtccctaccctggttttttgctggccccaaccactggccttgttgagtatcgatgggccctgagctcttctgtttgcttttggagctcttcagatgctgtcccccctgagaataccctaactctggggaaagagcagccaaaatcccaatacagtaaaactccacacaatcttgttagcaacagtgacccagaaaattttgagaagtccaatttcaccagaagaggcccagggctccctgtggtcacattttctacccagccattcttggcattgcaacctccatttctagctccwgttgaattttctccacccagaccccaaaaataaatggatccatgatgataattaagagaagagaaaaaaagatattatttttgttaggacaaaccattgtaggwttttagcaatgtgtatctgtgtgtccctcacaccttttcctattctacttttttttcctttttttaaaaatattatgtactatatttttagtctcaaacacactatatattatatatatttaatttttttatatatataaatataaatgttttaaaaagtaaaaaaaaaaaaaaaa

SEQ ID NO: 186 - DNA, 1450 bp, Homo sapiens
cttttgcaaaaagctatttaggtgacactatagaaggtacgcctgcaggtaccggtccggaattcccgggtcgacccacgcgtccgcccacgcgtccgcccacgcgtccgtgactgcagaacattctggaaactactcctgtgatgcagacaatggcctgggggcccagcacagtcatggagtgagtctcagggtcacagttccggtgtctcgccccgtcctcaccctcagggctcccggggcccaggctgtggtgggggacctgctggagcttcactgtgagtccctgagaggctccttcccgatcctgtactggttttatcacgaggatgacaccttggggaacatctcggcccactctggaggaggggcatccttcaacctctctctgactacagaacattctggaaactactcatgtgaggctgacaatggcctgggggcccagcacagtaaagtggtgacactcaatgttacaggaacttccaggaacagaacaggccttaccgctgcgggaatcacggggctggtgctcagcatcctcgtccttgctgctgctgctgctctgctgcattacgccagggcccgaaggaaaccaggaggactttctgccactggaacatctagtcacagtcctagtgagtgtcaggagccttcctcgtccaggccttycaggatagaccctyaagagcccactcactctaaaccactagccccaatggagctggagccaatgtacagcaatgtaaatcctggagatagcaacccgatttattcccagatctggagcatccagcatacaaaagaaaactcagctaattgtccaatgatgcatcaagagcatgaggaacttacagtcctctattcagaactgaagaagacacacccagacgactctgcaggggaggctagcagcagaggcagggcccatgaagaagatgatgaagaaagctatgagaatgtaccacgtgtattactggcctcagaccactagccccttacccagagtggcccacaggaaacagcctgcaccatttttttttctgttctctccaaccacacatcatccatctctccagactctgcctcctacgaggctgggctgcagggtatgtgaggctgagcaaaaggtctgcaaatctcccctgtgcctgatctgtgtgttccccaggaagagagcaggcagcctctgagcaagcactgtgttattttcacagtggagacacgtggcaaggcaggagggccctcagctcctagggctgtcgaatagaggaggagagagaaatggtctagccagggttacaagggcacaatcatgaccatttgatccaagtgtgaccgaaagctgttaatgtgctctctgtataaacaatttgctccaaaaaaaaaaaaaaaaaaaaaaaaaaaaaaaagggcggccgctctagaggatccctcgaggggccacaaa

SEQ ID NO: 187 - DNA, 2247 bp, Homo sapiens
ggcacgagctcatccatgcttggagaaggacaagtccttcggagcccaaccaaccggctgcttctgcacttccagagcccacgggtcccaaggggcggtggcttcaggatccactatcaggcctacctcctgagctgtggcttccctccccggccggcccatggggacgtgagtgtgacggacctgcaccctgggggcactgccacctttcactgtgattcgggctaccagctgcagggagaggagaccctcatctgcctcaatggcacccggccatcctggaacggtgaaacccccagctgcatggcatcctgtggtggcaccatccacaatgccaccctgggccgcatcgtgtccccagagcctgggggagccgtagggcccaacctcacctgccgttgggtcattgaagcagctgaggggcgccggctgcacctgcactttgaaagggtctcgctggatgaggacaatgaccggctgatggtgcgctcagggggcagccccctatcccccgtgatctatgattcggacatggacgatgtccccgagcggggtctcatcagtgacgcccagtccctctacgtggagctgctgtcagagacacctgccaatcccctgctgttaagccttcgatttgaagcctttgaggaggatcgctgcttcgcccccttcctggcacatggaaatgtcactaccacggaccctgagtatcgcccaggggcactggcaaccttctcgtgcctcccaggatatgccctggagccccctgggccccccaatgccatcgaatgtgtggatcccacagaaccccactggaacgacacagagccggcctgcaaagccatgtgtggaggggagctgtcggaaccagctggcgtggtcctctctcccgactggccccagagctatagcccgggccaagactgcgtgtggggcgtgcacgtccaggaagagaagcgcatcttgctccaagttgagatattgaatgtgcgggaaggggacatgctgacgctgttcgacggggacggtcccagcgcccgagtcttggcccagctgcggggacctcagccgcgccgccgccttctctcctctgggcccgacctcacactgcagtttcaggcaccgcccgggcccccaaatccaggcctgggccagggcttcgtattgcacttcaaagaggtcccgaggaacgacacgtgccccgagctgccacctccggagtggggctggagaacggcatcccacggggacctgatccggggcacggtgctcacctaccagtgcgagcctggctacgagctgctaggctccgacattctcacttgccagtgggacctgtcttggagcgccgcgccgcccgcctgccaaaagatcatgacttgtgctgaccctggcgagattgccaacgggcaccgcaccgcctcggacgccggcttccccgttggctcccacgtccagtaccgctgcctgccagggtacagcctcgagggggcagccatgctcacctgctacagccgggacacaggcacacccaagtggagcgatagggtccccaaatgcgccttgaagtacgagccgtgcctgaacccgggggttcccgagaatggctaccagacgctgtacaagcaccactaccaggcgggcgagtctctgcgcttcttctgctatgagggctttgagcttatcggcgaggtcaccatcacctgtgtgcccggccacccctcccagtggaccagccagcccccactctgcaaagttgcctatgaggagctcctggacaaccgaaaactggaagtgacccagaccacagatccatcacggcagctggaaggggggaacctggccctggccatcctgctgcctctaggcttggtcattgtcctcggcagtggcgtttacatctactacaccaagcttcagggaaagtcccttttcggcttctcgggctcccactcctacagccccatcaccgtggagtcggacttcagcaacccgctgtatgaagctggggatacgcgggagtatgaagtttccatctgaaccccaagactacagctgcaggacccaggacgcccctcccctcctcattcgggcagagggaaatacgggacccggtctctgcctcctggctgccctcctccctggctgtgtaaatagtctccctatcccacgagggggctttgatggccctggagatcctacagtaaataaaccagcatcctgccgcccaaaaaaaaaaaaaaaaaa

SEQ ID NO: 188 - DNA, 850 bp, Homo sapiens
  SITE (20): n equals a,t,g, or c
  SITE (23): n equals a,t,g, or c
  SITE (844): n equals a,t,g, or c
  SITE (846): n equals a,t,g, or c
actaccggtcacagtggtgnctnggacacacgtgtccctctcccaaggatctggcagccaaaggcgctttcatgaaaatatttattacccaataaaaatattcacccagtgcttcagcttacggtaaactaaacacatctattatttacaacatagaaaattaaaggcgatgcccaagtcccggccttccgcaggggcgccgctcccgctggaggacggaagggaccagggaccgagggtgcgcgggcgcatccgggcgcaggaggcggtgcaggagtgcgcagggcagcaagagtagcaggctgggcgcgcccccggcgctcggcccgtgagcgtgggaggccaggaagtctttcgggtcacagcggtcaggcgtctggagggggaggcagtgcagggccccgaagatgcacctgcagaggtggcaggcgcggagggtccaggctccgtgctccagggcgccgcattcactgcgcctctggtcatgctcgcagtagcggccggtgaagtgggccgggcacacgcagaagctgcccagcacgcaggtaccgccgttcctgcagcagcgcggccgcgcggacgcaccctctccgaaagcccgggagtaggggagcggctcctccggcccccagccctcggcgctcccagtcacctctccgaaatgactggaggtccagttaagcggtgactgtcggtgcttctgagtggcaaccttggtgacttcccctctaccgccgttatgtttctctctttgatagctgtttcccaaattgatgatctgtaatgccaaactgaccgtaaacagaagcctgacatggtgcctccaggtcatttttggtttganantctc

SEQ ID NO: 189 - DNA, 2330 bp, Homo sapiens
tcgcccgctcgaaattaaccctactaaagggaacaaaagctggagctccaccgcggtggcggccgctctagaactagtggatcccccgggctgcaggaattcggcacgagacggaggcccggaccgtgctcaggtgctgccgagggtggacgcagcagcccgacgaggagggctgcctctcggctgaatgcagcgccggcctctgttttcacggtggccgttgtgtgccaggctcagcccagccgtgtcactgtccccccggcttccagggaccccgctgtcagtatgatgtggacgaatgccgaacccacaacggtggctgccagcaccggtgcgtgaacaccccaggctcctacctctgtgagtgcaagcccggcttccggctccacactgacagcaggacctgcctggccattaactcctgcgccctgggcaatggcggctgccagcaccactgtgtccagctcacaatcactcggcatcgctgccagtgccggcccgggttccagctccaggaggacggcaggcattgtgtccgtgagtgctgccagcctgggagggaggacctgggggtggaggcaggacaagctgcctcgcctgggctgttgggtggaagtgggtcttcaggaggcccccaaggctgctgagakkcctggtagggatggcacatttggggccaggaagctcaggatgggggccacctcacttccataggtgcccacctgaggcttgctgcccttgggakgaggaggcaggccagtccggtttggcactttgctctgagtcctcagggctgcttgcgtggaaagggggggctttgctgatggtgacggtgcggcagactcagtggtcctccagaatatggaaatgggggctgtgggtggggcaggtgctgagagaatgcccccacctgggcctctgggtcctccccagtgtgggcatgaaggggctgkwgtcwcagagctggggggccgccgccttggtgtcagcgccagcacctgggctaagaagggtggtgggaggagctggcctgggccgctgcctgacctgggctggctggccgcgtcctgagactgcagagtcttctcggcgtcttgggggcttcccgcacctgggaggagggagacccgctgcccagcccatcagcctggagcacagagtggggagagcactgggtgaggggtctcacaagaagcctgggggcaggcgccctgcagccactggggtcccctctccccaaccccctcctcgggcccgtggctgcaggtagaagcccgtgtgccaacaggaacggcagctgcatgcacaggtgccaggtggtccggggcctcgcccgctgtgagtgccacgtgggctatcagctagcagcggacggcaaggcctgtgaaggtaggacgcccctcccctgctccgccccgcccagggtcagaaagcgcacccaggtgctgtggagggacccgtgtctaactctggggccgtggcctcccatgagaccaggccctttggccttgcccccttgggtgacctgggatgtggcggtctcatctcccttgctgggggctgaggggcgagggtaggaaggctcgcaaaagctgctcccagcccgaggctcatttcactaggagtgagccagggagcccaggtgttgcttatagtttttaaactattgtatttcctttttttttttttgagacggagtctcgctctattgcccaggctggagtgcagtggcgtgatctcagctcactgcaagctccgcctcccaggctcacgccattctcttgccttggcctccccagcagctgggactacaggcacccgccgccaggcctggctaatttttcgkatttttagtagagatggggtttcaccatgttggccaggatgctctcaatctcctgaccttgtgatccgcccgcctcggcctcccaaagtgctgggattacaggcgtgagccactgcacctggcctaaactattgtatttcctaagtagtgcctgcccagcaggaaaactgaagagatgaataagagaaaaggagaaatgagccaggcgctgtggctcacacctgtaatcccagcactttggtaggccaacgagggaggaccacttaagccaagttgctcaagaccagcctgggcagcatggcgagaccctgtctctaaacaattttttttttaattagccaggtgtggtggtgctgtctggagtcctagctgctccggaatctgaggcgggaagatcacttgagcccaggaggtcaaggctgcagtgggctgtgatcacaccactgcactccagcctgggtggcagagcaagattctgtctctt

SEQ ID NO: 190 - DNA, 2858 bp, Homo sapiens
ccgggtcgacccacgcgtccgcaaggattgtagcttggactgtgcgggttcgccccagaaacctctctgcgcatctgacggaaggaccttcctttcccgttgtgaatttcaacgtgccaagtgcaaagatccccagctagagattgcatatcgaggaaactgcaaagacgtgtccaggtgtgtggccgaaaggaagtatacccaggagcaagcccggaaggagtttcagcaagtgttcattcctgagtgcaatgacgacggcacctacagtcaggtccagtgtcacagctacacgggatactgctggtgcgtcacgcccaacgggaggcccatcagcggcactgccgtggcccacaagacgccccggtgcccgggttccgtaaatgaaaagttaccccaacgcgaaggcacaggaaaaacagtctccttgcaaatcttttccgttctgaattcagatgatgccgcagctccagcgttggagactcagcctcaaggagatgaagaagatattgcatcacgttaccctaccctttggactgaacaggttaaaagtcggcagaacaaaaccaataagaattcagtgtcatcctgtgaccaagagcaccagtctgccctggaggaagccaagcagcccaagaacgacaatgtggtgatccctgagtgtgcgcacggcggcctctacaagccagtgcagtgccacccctccacggggtactgctggtgcgtcctggtggacacggggcgccccattcccggcacatccacaaggtacgagcagccgaaatgtgacaacacggccagggcccacccagccaaagcccgggacctgtacaagggccgccagctacaaggttgtccgggtgccaaaaagcatgagtttctgaccagcgttctggacgcgctgtccacggacatggtccacgccgcctccgacccctcctcctcgtcaggcaggctctcagaacccgaccccagccataccctagaggagcgggtggtgcactggtacttcaaactactggataaaaactccagtggagacatcggcaaaaaggaaatcaaacccttcaagaggttccttcgcaaaaaatcaaagcccaaaaaatgtgtgaagaagtttgttgaatactgtgacgtgaataatgacaaatccatctccgtacaagaactgatgggctgcctgggcgtggcgaaagaggacggcaaagcggacaccaagaaacgccacacccccagaggtcatgctgaaagtacgtctaatagacagccaaggaaacaaggataaatggctcataccccgaaggcagttcctagacacatgggaaatttccctcaccaaagagcaattaagaaaacaaaaacagaaacacatagtatttgcactttgtactttaaatgtaaattcactttgtagaaatgagctatttaaacagactgttttaatctgtgaaaatggagagctggcttcagaaaattaatcacatacaatgtatgtgtcctcttttgaccttggaaatctgtatgtggtggagaagtatttgaatgcatttaggcttaatttcttcgccttccacatgttaacagtagagctctatgcactccggctgcaatcgtatggctttctctaacccctgcagtcacttccagatgcctgtgcttacagcattgtggaatcatgttggaagctccacatgtccatggaagtttgtgatgtacggccgaccctacaggcagttaacatgcatgggctggtttgtttcttgggattttctgttagtttgtcttgatttgctttccagagatcttgctcatacaatgaatcacgcaaccactaaagctatccagttaagtgcaggtagttcccctggaggaaataatattttcaaactgtcgttggtgtgatactttggctcaaaggatctttgcttttccattttaagcttctgttttgagttttgccctggggcttgaatgagtcccagagagtcgttcggatggtgggaggctgcctaggaggcagtaaatccagtcacagtgcctgggaggggcccatccttccaaaatgtaaatccagtcgcggtgtgaccgagctggctaacaggcttgtctgcctggttttcctcctacacgtggacattattctcctgatcctcctacctggtccaccccagggctaccggaaggtaaaatcttcacctgaaccaattatgagcagtctccttactgaaggtacagccggatacgtggtgcccccggggctggtgttggcagccggggggaggtgcctgagggtccccacggttcctttctgcttttctgaatgcatcaagggtacgagaacttgccaatgggaaattcatccgagtggcactggcagagaaggataggagtggaatgcccacacagtgaccaacagaactggtctgcgtgcataaccagctgccaccctcaggcctgggccccagagctcagggcacccagtgtcttaaggaaccatttggaggacagtctgagagcaggaacttcaagctgtgattctatctcggctcagacttttggttggaaaaagatcttcatggccccaaatcccctgagacatgccttgtagaatgattttgtgatgttgtgatgcttgtggagcatcgcgtaaggcttcttgcttatttaaactgtgcaaggtaaaaatcaagcctttggagccacagaaccagctcaagtacatgccaatgttgtttaagaaacagttatgatcctaaactttttggataatcttttatatttctgacctttgaatttaatcattgttcttagattaaaataaaatatgctattgaaactaaaaaaaaaaaaaaaaaaaa

SEQ ID NO: 191 - DNA, 810 bp, Homo sapiens
  SITE (763): n equals a,t,g, or c
  SITE (790): n equals a,t,g, or c
taatacgactcactatagggaaagctggtacgcctgcaggtaccggtccggaattcccgggtcgacccacgcgtccgcacaacactctgaatgttaatccagatccctcttgttgagtagctgcagagacggcagatggaaaatatgctcagaagttgtttaatgacctttttgaagattattccaatgctcttcgtccagtggaagatacagataaagtcctgaatgtgaccctgcagattacgctctctcagattaaggatatggatccaatccagaataccacattatatttagccaaaatatacttttcggggaaaaacttgtaaggaagacttcaaaaatatgcatccaaatgttaacagaaatgtccaattaaggctctttggttgtaagcatcagaaactgactttggcaaccttgtgaaataggratttgttagaaggatgtggcacatctyattgaattaaaggaaaaagtawacaaccagctcttggaaaggacagaaccaaggctgctctagtgttcaaggcaggagggactgtctgttttttttcagccatcactagggtgatgcttttggtctctggatcactctgcttaagatcgaaactctggagagggtgaatctgttggaccaagcctgggccacccagcccggcctttgccagggacactggggcaccttgaccaacacttcctctgccttgcaatgggagaggaagtaatgggagaaggaggaagtaacgggagaaagagtaanttccttagagaaaaatagaaattctgnaccccaaaatacaaggcata

SEQ ID NO: 192 - DNA, 810 bp, Homo sapiens
  SITE (548): n equals a,t,g, or c
  SITE (576): n equals a,t,g, or c
  SITE (710): n equals a,t,g, or c
  SITE (714): n equals a,t,g, or c
  SITE (721): n equals a,t,g, or c
  SITE (749): n equals a,t,g, or c
  SITE (789): n equals a,t,g, or c
  SITE (804): n equals a,t,g, or c
aaaagctatttaggtgacactatagaaggtacgcctgcaggtaccggtccggaattcccgggtcgacccacgcgtccggaaggagaagctcaaagcataacctccttagcttcatcctagatctacttgaaactacaatattaaccattcacttaaaagtcattaacaccataggaatgagtcctgggactaacagtgttgagtggtcatcctgaaccatattcctactggtttttttggtctctttttctctctgtctaggactttacaatgactttttatctcaggcattactggaaagacgagaggctctcctttcctagcacagcaaacaaaagcatgacatttgatcatagattgaccagaaagatctgggtgcctgatatcttttttgtccactctaaaagatcctcatccatgatacaactatggagaatatcatgctgcgcgtacaccctgatggaaacgtcctcctaagtctcaggrtaacggtttcggccatgtgcyttatggatttcagcaggtttcctcttgacactcaaaattgntctcttgaactggaaagctatgcctacnatgaggatgacctaatgctatactggaaacacggaaacaagtccttaaatactgaagaacatatgtccctttctcagttcttcattgaagacttcagtgcatctagtggattagctttctatagcagcacaggntggnacaatangcttttcatcaactttgggctaaaggangcatggtttcttctttgggctgcaaacctattttcccagnccttaattggatggngaaggc

SEQ ID NO: 193 - DNA, 1729 bp, Homo sapiens
ccacgcgtccgcccacgcgtccggtcattgaagggaatctcattagtctgttgtgtgaatcaagtggtattccacccccaaatctcatctggaagaagaaaggctctccagtgctgactgattccatggggcgagttagaattttatctgggggcaggcaattacaaatttcaattgctgaaaagtctgatgcagcactctattcatgtgtggcgtcgaatgttgctgggactgcaaagaaagaatacaatctgcaagtttacattagaccaaccataaccaacagtggcagccaccctactgaaattattgtgacccgagggaagagtatctccttggagtgtgaggtgcagggtattccaccaccaacagtgacctggatgaaagatggagtgatgcatcccaggacaactttcctcatggtagatgaggaacagactgttccttttgccttgagggatgaaaacctgaaaggagtggtgtatacaacacgaccactacgagaagcagagacctaccgcatgagggtccgagcctcatcctacagtgccaatgggaccattgaatatcagaccacattcatagtttatatagctgtgtccgcctatccatactaaggaactctccaaagcctattccacatatttaaaccgcattaatcatggcaatcaagcccccttccagattactgtctcttgaacagttgcaatcttggcagcttgaaaatggtgctacactctgttttgtgtgccttccttggtacttctgaggtattttcatgatcccaccatggtcatatcttgaagtatggtctagaaaagtcccttattattttatttattacactggagcagttacttcccaaagattattctgaacatctaacaggacatatcagtgatggtttacagtagtgtagtacctaagatcattttcctgaaagccaaaccaaacaacgaaaaacaagaacaactaattcagaatcaaatagagtttttgagcatttgactatttttagaatcataaaattagttactaagtattttgatcaaagcttataaaataacttacggagatttttgtaagtattgatacattataataggacttgcctattttcatttttaagaagaaaaacaccactcattttataaaatatagtacagctactataaggcttgtttgatcccaaatggtgcttatcttgattgaacattcagaacaaggatattattttcagtgattttgtgagatcagctgaaccacttatgataataataataaaaaagactgctttgccctcacgtcagttgtacatggcatggaactttaaaaattttaatataaactttcatccagttagcttcataacttttacgttccagaattttgtttattttcctgtcaatgaaagcaatttttaaagataccagtgggacaggtttggttttttaaaaatctcatgtgttcaaattaacataaatattacacgtcaatacactgtacatggtggtaatagactctaagcaattgccaagatgtattctatttttatgaagtgtatatatattaccttagtgtgcattttctatataatatcttgatggactcttttataaaattattttataaaaaacaatgttacactaaaatcagcctaaataaattttcacaactttttttcataaaaaaaaaaaaaaaaaaaaaaaaaaaaaaaaaaaaaaaaaaa

SEQ ID NO: 194 - DNA, 392 bp, Homo sapiens
  SITE (16): n equals a,t,g, or c
  SITE (177): n equals a,t,g, or c
  SITE (209): n equals a,t,g, or c
aaataggagccgcagncattgggctcttggggcttgtagccaggtctgggcattggtgcctttccatatcggcacctgtactgacagactccattcttccctcccagcagctccagaaaagaatcgaagtagctattgacggattcaaagcttccccggaggtgccgaaggccccantctgaataggactcctccgtgtcagggctcgngtcgctctgagccaggccacccccaaggctgagccacaaaaccaagaagccactggccagcttcatcctgcagccaggtaggtactggcttctctcctcaaaccccagccagtgtcccagaattccagggacaaaccccctacccagatgtcaggcaggactgggaaagggattatctggaac

SEQ ID NO: 195 - DNA, 1392 bp, Homo sapiens
ggcacgagagaaaaaccatctcagaaaaaggaaaatgggcaatcgtcatgctaaagcgagcagtcctcagggttttgatgtggatcgagatgccaaaaagctgaacaaagcctgcaaaggaatggggaccaatgaagcagccatcattgaaatcttatcgggcaggacatcagatgagaggcaacaaatcaagcaaaagtacaaggcaacgtacggcaaggagctggaggaagtactcaagagtgagctgagtggaaacttcgagaagacagcgttggcccttctggaccgtcccagcgagtacgccgcccggcagctgcaggaggctatgaagggtctgggcacagatgagtccgtcctcattgaggtcctgtgcacgaggaccaataaggaaatcatcgccattaaagaggcctaccaaaggctatttgataggagcctcgaatcagatgtcaaaggtgatacaagtggaaacctaaaaaaaatcctggtgtctctgctgcaggctaatcgcaatgaaggagatgacgtggacaaagatctagctggtcaggatgccaaagatctgtatgatgcaggggaaggccgctggggcactgatgagcttgcgttcaatgaagtcctggccaagaggagctacaagcagttacgagccacctttcaagcctatcaaattctcattggcaaagacatagaagaagccattgaagaagaaacatcaggcgacttgcagaaggcctatttaactctcgtgagatgtgcccaggattgtgaggactattttgctgaacgtctgtacaagtcgatgaagggtgcggggaccgatgaggagacgttgattcgcataatcgtgaccagggccgaggtggaccttcaggggatcaaagcaaagttccaagagaagtatcagaagtctctctctgacatggttcgctcagatacctccggggacttccggaaactgctagtagccctcttgcactgagccaagccagggcaataggaacacagggtggaacaacctttgtcaagagcacattccaaatcaaacttgcaaatgagactcccgcacgaaaacccttaagagtcccggattactttcttggcagcttaagtggcgcagccaggccaagctgtgtaagttaagggcagtaacgttaagatgcgtgggcagggcaccttgaactctggcttagcaagcatctaggctgcctcttcactttcttttagcatggtaactggatgttttctaaacactaatgaaatcagcagttgatgaaaaaactatgcatttgtaatggcacatttagaaggatatgcatcacacaagtaaggtacaggaaagacaaaattaaacaatttattaattttcaaaaaaaaaaaaaaaaaaaa

SEQ ID NO: 196 - DNA, 321 bp, Homo sapiens
  SITE (301): n equals a,t,g, or c
  SITE (314): n equals a,t,g, or c
  SITE (318): n equals a,t,g, or c
acaagcagtggccacgtggccgtctcgagttccagactgaccactccacagggaagaggrgcttcaacatcacttttaccaccttccgacacaacgagtgcccggatcctggcgttccagtaaatggcaaacggtttggggacagcctccagctgggcagctccatctccttcctctgtgatgaaggcttccttgggactcagggctcagagaccatcaactgcgtcctgaaggagggcagcgtggtcttggaacaacgctgtgctgcggtgtgaagttccctgtggtggtcaactgattngcccagggcaacncctnttt

SEQ ID NO: 197 - DNA, 409 bp, Homo sapiens
  SITE (358): n equals a,t,g, or c
  SITE (362): n equals a,t,g, or c
  SITE (377): n equals a,t,g, or c
  SITE (408): n equals a,t,g, or c
gtgacaatggttctaaaatccaaaactttgtattagaatgggatgaaggaaaaggaaatggagaattttgtcagtgttacatgggctcacagaaacaatttaaaattactaaactttcaccagcaatgggctgtaaattcagactatcggccagaaatgactatggtacaagtggttttagtgaagaagtcttatattacacctcaggctgtgctccttctatgccagcaagtcctgtattaaccaaggctggaattacttggttatccttacaatgggagtaagccctcaggaacaccatcagatgaaggrattttcttacattttagagatggaggaagaaacttcaggrtatggntttnaagcctaaatatggnggagaagatcttgcttacacagtgaaaatcnc

SEQ ID NO: 198 - DNA, 2482 bp, Homo sapiens
gacttttagttgtttcattgttaatatgtagaaacacaattgatttttgtatattgaactttgtatactgcagtcttgccaagttcccttattaacttagggaggtttctttggtagactctttggggttttctatctatatatataatcatgctgcctggaataaagacagttttacttcttccattccatttttgccttttatttatttttcatgccttattgcactggctaggatttctagtatatgttaaaaagagaaagcattcagtctttcttcattaaacatgatgttagctatatctgttttaaagaggctgtttatcaggttgagtaagtttcattctattcctggtttagtagagcttttatcattaatagatgttgaattttgcaagtgatttttaaaatatctattgagaatatatggtttttaatctttattttattgataatggtaaattatgtwaattttttgaatattgaattagcctggcatttccaggataaatgcacttcatcatgatgtaataccccttttatatgttgccagatttggtttccttatattttgttaaaagtttttgcatttatgttcacaaaaaatatgaaatttctagtctttttttctcttaatctctttgtctggttttgatatcaggatattgtatcttataaaaggctttgggaagagctttcttcaatctggattgtgctggttagtataaacaagaatatatagtgtgctatcttttatgtaagaaaaaagggaaaataacacatacatatatatgcttgactttacaaaaagaaggggtagtgagaggtaatggggccagaggtttatgggaggcaatgacacttcaaagtaaacctttttttaaaaaatatagttttggcttttcatagtgtgttttttcagtattcaaaataaggacggaaatggggagaatcctaatccactgaaacaaatgaacctgaatgtattttaaattagtattgtacccccattgagggaacaaagagtaaatctaagtaatttattactaataacatggtgctataactataaccatataccgtcagcttgggtagagttgaaagagacgggttgcaggcaactcttgaactcattctattaggtttacttttcatagtgatatggacatagcacttctgggactttttaggtgtattggggattgagtaaatgttttgaggttgttggagtgagggttctccctgaagaaggagagacacacaaatatggggtgggagaaggcataataaattctgtgcaggtggattggaaattgaaggtatcagtgagttcatgatgttttaagccaatatatatgtacatgtaattgcatgtacagacatatgtacataaatttgtatgtgtatttgcattcatacatttcctagctctgtccagtaaaagggctaagaggcaaagagcatacctaactccaaattcttggaattagaattctgtaataccattctcaagtcaaaggaaccagagctcctcacagaaatagatgattctaggatagggtagggcacataccatgtgagcctggattatttttcaatgcgagaaaatagaaactttttttttttaaataagaacatgtcacaagaagcctattggcattcctgctagccaaatttgagataatttaataatcaagtaagtataataataaattatgaaccattagaaataggaataaatccataatgataataaaaataagtgaatgaatagaggagaaaggaaggctctttcttccagtaggactctgagctttagagttggaaaaatcattattttgtagctagcgtagtagatattaggtagggcaagagtcataactaaatgagggagaaattttgatgagaagcaggatattttcgatgtcttaaagcatcaccccacagactgtgtactaattgcaagggataatatagtgattatgcattggtgcgatccaacaacaatatggggcagatggtcaccatgtgactccagataggacaccctgaggggacacatcatctcctctgtagtattctggccaagactgcataacctgaatttaatcacgaggaaacattcgacaagtgcaaaataaggaatgttctactttaaaaagcggggagggaactgtggtccttaaaaaagtcagtgtcataaaagagaaagaaaggctatggaagtgttccaaattaaaggaggcatagaagagagaaccactaacagtacctgaccctagactggatcttatactgaatgggggaaaatataccatgcaggatgttattggatcaattgaaaaattagaatattggaatatagaccatagaatagataaaaatattgtaacaatgttataattactgaagttgatcactgtgctttccttataagagaaagtattgctaaagaaacacacattggaaaaaaaaaaaaaaa

SEQ ID NO: 199 - DNA, 1604 bp, Homo sapiens
tcgacccacgcgtccgctgcagctgtggggagatttcagtgcattgcctcccctgggtgctcttcatcttggattattccttgggcctgaatgacttgaatgtttccccgcctgagctaacagtccatgtgggtgattcagctctgatgggatgtgttttccagagcacagaatacaaatgtatattcaagatagactggactctgtcaccaggagagcacgccaaggacgaatatgtgctatactattactccaatctcagtgtgcctattgggcgcttccagaaccgcgtacacttgatgggggacaacttatgcaatgatggctctctcctgctccaagatgtgcaagaggctgaccagggaacctatatctgtgaaatccgcctcaaaggggagagccaggtgttcaagaaggcggtggtactgcatgtgcttccagaggagcccaaagagctcatggtccatgtgggtggattgattcagatgggatgtgttttccagagcacagaagtgaaacacgtgaccaaggtagaatggatattttcaggacggcgcgcaaaggaggagattgtatttcggtactaccacaaactcaggatgtctgcggagtactcccagagctggggccacttccagaatcgtgtgaacctggtgggggacattttccgcaatgacggttccatcatgcttcaaggagtgagggagtcatgatggaggaaactacacctgcagtatccacctagggaacctggtgttcaagaaaaccattgtgctgcctgagcagcccaaagagcctataacacttggtgaccccgccagccctgaaggctctggtcttgggtggtaatcagttggtgatcattgtgggaaattgtctgtgccacaatcctgctgctccctgctcctgatattgatcgtgaagaagacctgtggaaataagagttcagtgaattctacagtcttggtgaagaacccgaagaagactaatccagagataaaagaaaaaccctgccattttgaaagatgtgaaggggagaaacacatttactccccaataattgtacgggaggtgatcgaggaagaagaaccaagtgaaaaatcagaggccacctacatgaccatgcacccagtttggccttctctgaggtcagatcggaacaactcacttgaaaaaaagtcaggtgggggaatgccaaaaacacagcaagccttttgagaagaatggagagtcccttcatctcagcagcggtggagactctctcctgtgtgtgtcctgggccactctaccagtgatttcagactcccgctctcccagctgtcctcctgtctcattgtttggtcaatacactgaagatggagaatttggagcctggcagagagactggacagctctggaggaacaggcctgctgaggggaggggagcatggacttggcctctggagtgggacactggccctgggaaccaggctgagctgagtggcctcaaaccccccgttggatcagaccctcctgtgggcagggttcttagtggatgagttactgggaagaatcagagataaaaaccaacccaaatcattcctctggcaaaaaaaaaaaaaaaa

SEQ ID NO: 200 - DNA, 1735 bp, Homo sapiens
ctgaggctcagccaagcccaggggaacctgtcggttctggagacccggcaggtacagctggagtgtgtggttctcaaccgcaccagcataacctcccagctcatggtggaatggtttgtatggaagcccaaccaccctgagcgggagactgtggcccgcttgagccgtgacgccaccttccactatggagagcaggcagccaagaacaatctgaaggggcggctgcatttggagagtccttcccccggcgtgtaccgtctcttcatccagaacgtggctgtgcaggacagcgggacctacagctgccatgtggaggagtggctgcccagccccagtggcatgtggtataagcgggcagaggacaccgctgggcagacagctctgacagtcatgcgaccagatgcttccctgcaggtggacacagtggtccccaatgccacggtctctgagaaggcagctttccagctggactgtagcatcgtgtcccgctccagccaggactcccgcttcgctgtggcctggtattccctgaggactaaagctggggggaaaaggagcagccctggcctggaagacaggaagaggaaagggaggaggaggaggaggaggacgacgacgacgacgacgacccaacagagcggacggccctgctgagcgtgggcccagatgctgtctttggcccagagggcagtccttgggagggcaggcttcgcttccagaggctctccccggtgctctaccggctcacagtgctgcaggcaagcccccaagatacaggcaattactcctgccatgtggaggagtggctgcccagccctcagaaggaatggtaccggctgacggaggaggagtcagcccccatcggcatccgtgttctagatacaagtcccaccctccagtccatcatctgctccaacgacgcactcttctacttcgtcttcttctaccctttccccatctttggcattcttatcatcaccatccttctggtgcgtttcaagagccggaactccagcaagaactctgatgggaagaatggggtgcctctgctgtggatcaaagagccacacctcaactactcccctacttgcctggagccccctgttctcagtatccatccaggggccatagactaagcgggtgatgccccagcggatgttggccacggaggagctgaggctctccctttctctgtgattggacagttgacagcacccaaactctggggtgcatgtgtgtggaaagttgtcagacttgaaaagtgttccaagttcccagtcagtcacagagacagactgcctctcggtggcagtcttggttggttagctatttgcgcgcaaatgttgtgatcctgccattatagatttcttgtttctgtttttagtaatgtagtgagtagctccaggtgccacatctactcacagatttatctagtattctcagatagatgttacagggcttcttattctttgtaatgtactctttttaaatccctttagtttaccctttttggattccttaatgtggacgaatttctcttacgtacaactgacagcaaaaggaagggcgaactttctagtgacaaggaatctcttccaagactttgtttttgcacatttgaaaatgccacccatggatcaaaatatacccaaacgttttttactttcttaaaaaaaaaaaaaaaaaaaaaaaaaaaaaaaaaaaaaaaaaaaaaaaaaaaaaaaaaaaaaaaaaa

SEQ ID NO: 201 - DNA, 2514 bp, Homo sapiens
gatgcacattattgaagagacacaagtgttcagggagtcccagtctgtggaaaatctagtcatctctctattgcagcacagcctctatgtgggggctcctagcggagtcatccagctaccactctccagctgctcccgctaccgatcctgctatgactgcatcttggcccgagacccctactgtggctgggaccctggcacccatgcctgcgcagcagccaccaccatagccaacaggtcccagggaagcaggacagcactgatacaggacatagagagaggaaatcgaggctgtgagagcagcagggatacagggccaccaccaccactgaagacccgctctgtgctccggggtgatgatgtcctcctgccctgtgaccagccatccaacctggcccgggccttgtggctactcaatgggagcatgggcctgagcgatgggcagggtggctaccgtgtgggcgtggacgggctgctggttacagatgcacagcctgagcacagtggcaactatggctgctatgccgaggaaaatggcctccgcaccctgctggcctcctatagtctcacagtccggccagccactcctgccccagctccaaaagcccctgccacacctggggcacagctggcacctgatgtgagactgctctatgtgctagccattgccgcgcttggtggcctctgcctcatcctggcctcctccctcctctatgtggcctgtctgcgggaaggcagacgagggcgccgacggaaatactcactgggtcgggccagccgggcaggaggatctgcggtgcaactgcagacagtctcaggccagtgtcctggagaggaagatgagggtgatgatgagggggctgggggcctggagggcagctgtctccagatcatccctggggagggagccccagccccaccacccccaccgcccccaccgccaccggctgagctgaccaatggcttggtggcactgcccagccggctgcggaggatgaatggcaatagctatgtgcttctgaggcagagcaacaatggagtaccagcagggccctgctccttcgccgaggaactcagccgcatcctggaaaaaaggaagcacacgcagctcgtggagcagctagatgagagctctgtctgagcccagcctcccagaacaaatgctcttccaagccagcctatctgtcccaggctgggccactgcctccctaacacagccaccctcccttcattacccccactccatacccttctcccaactttttgatgtccctgtagggctggccagtcaggcccagccaaagccccctcctcagtctccacagacccacatgtgagcagcccaggcccatcggtgctcctcagaggcagggctctgcaggtccatatgggctcaatgtcaccaccctctgcatggccctgtgtgctggatggtcctgaaaccagacaagacctctgccagccacctaagccctgcgtacattcacatgcacacatggaagaatgtttatcggctgggctgcagtgcccccaccctcaccttctcctggtgcattcttgtttcatccctgcttctggacttggggtaccctcccaattgccacatcctatctggtcctcttccccagccccatgtggtgacctctttgtcaagagcttgggaacgggccagcctggggaggtaagactgcatcactcccctcctctcccttcctgtgtggcccttgtgaatcagcctccccactctccttggtcattctcaagagtatgagagacagagctccaggcatgtcccatccccatgcacatgtggtaacacacacctgtatcacacatgtgcttacatttccactcacatgcacctctgagcctcccttgctgtcttggacctgtctgttgggtttagtccgtggacatttcagagggagatccccctcccatttaactgtcctcacaggcccttgcctaggatggatgaccaacactgcactcaatgagccagcctctcttttgggggaatcaagcatttgcttcctctagactacagcagggaaagggaggagaaatctgatgtctcaactggcacatgaagcccattcttggaactatgcaaagggcagaggctgggagtttggacgcttagctcctacccctgtcctacctcaccggggcactttcagggtccaggggcctctgaagtctctaggcctatatgggacaatcaattctgactgagctcccccattcccctcgggtgaggatgactgttatttttgtagctgagaacgtggaatcccacgggtttttactgcccttcacccaacctctcccacctccaccccacaatgaatgtatttattgtgagaatggctacacttctttaggaatgcccccacttacaaccaggtgggtggaacaggcatgtgacagagtggggagcctgggctcagctcctccccctgccgttggttaataaacaccctttttccccacaaaaaaaaaaaaaaaaaaaaa

SEQ ID NO: 202 - DNA, 339 bp, Homo sapiens
aggaagagacgaccctggagccagtccccagagcagcagccagccagaccacggccgcctctcccccccagaagctcccgacaggcccaccatctccacggcctccgagacctcagtgtacgtgacctggattccccgtgggaatggtgggttcccaatccagtccttccgtgtggagtacaagaagctaaagaaagtgggagactggattctggccaccagcgccatccccccrtcgcggctgtccgtggagatcacgggccttagagaaaggcacctmctacaagtttcgagttccgggttytgaacatgctgggggagagcgagcccagsgcccct

SEQ ID NO: 203 - DNA, 584 bp, Homo sapiens
  SITE (380): n equals a,t,g, or c
  SITE (416): n equals a,t,g, or c
  SITE (471): n equals a,t,g, or c
  SITE (487): n equals a,t,g, or c
  SITE (545): n equals a,t,g, or c
gggaccctcgtcatcactgcccttaacaaccacactgtgggacggtaccagtgtgtggcccggatgcctgcgggggctgtggccagcgtgccagccactgtgacactagccaatctccaggacttcaagttagatgtgcagcacgtgattgaagtggatgagggaaacacagcagtcattgcctgccacctgcctgagagccaccccaaagcccaggtccggtacagcgtcaaacaagagtggctggaggcctccagaggtaactacctgatcatgccctcagggaacctccagattgtgaatgccagccaggaggacgagggcatgtacaagtgtgcagcctacaacccagtgacccaggaagtgaaaacctccggctncagcgacaggctacgtgtgcgccgtccaccgctgangctgcccgatcatctaccccccagaggcccaaaccatcatcgtcaccaaagccanagtctcattcttggantgtgtggccagtggaatcccacccccacgggtcacctgggccaaaggatgggtccagngtcaccggctacaacaaagaccgctttcctgcttaacaa

SEQ ID NO: 204 - DNA, 1332 bp, Homo sapiens
gttccgggcagggaatgatataagctggaaggctccagtggccacaaacaacccagcttgggcagtgcaggaggaaactcgggaccgattccacctccttggggacccacagaccaaaaattgcaccctgagcatcagagatgccagaatgagtgatgcggggagatacttctttcgtatggagaaaggaaatataaaatggaattataaatatgaccagctctctgtgaacgtgacagccccagcaccacggcaccagcctcacctgtcaggtgaccttgcctggggccggcgtgaccacgaacaggaccatccaactcaatgtgtcctaccctcctcagaacttgactgtgactgtcttccaaggagaaggcacagcatccacagctctggggaacagctcatctctttcagtcctagagggccagtctctgcgcttggtctgtgctgttgacagcaatccccctgccaggctgagctggacctggaggagtctgaccctgtacccctcacagccctcaaaccctctggtactggagctgcaagtgcacctgggggatgaaggggaattcacctgtcgagctcagaactctctgggttcccagcacgtttccctgaacctctccctgcaacaggagtacacaggcaaaatgaggcctgtatcaggagtgttgctgggggcggtcgggggagctggagccacagccctggtcttcctctccttctgtgtcatcttcattgtagtgaggtcctgcaggaagaaatcggcaaggccagcagcggacgtgggagacataggcatgaaggatgcaaacaccatcaggggctcagcctctcagggtaacctgactgagtcctgggcagatgataacccccgacaccatggcctggctgcccactcctcaggggaggaaagagagatccagtatgcacccctcagctttcataagggggagcctcaggacctatcaggtcaagaagccaccaacaatgagtactcagagatcaagatccccaagtaagaaaatgcagaggctcgggcttgtttgagggttcacgacccctccagcaaaggagtctgaggctgattccagtagaattagcagccctcaatgctgtgcaacaagacatcagaacttattcctcttgtctaactgaaaatgcatgcctgatgaccaaactctccctttccccatccaatcggtccacactccccgccctggcctctggtacccaccattctcctctgtacttctctaaggatgactactttagattccgaatatagtgagattgtaacgtgaaaaaaaaaaaaaaaaaaaaaaaaaaaaa

SEQ ID NO: 205 - DNA, 328 bp, Homo sapiens
  SITE (231): n equals a,t,g, or c
  SITE (236): n equals a,t,g, or c
gtttgccttctttgccgtggagatggtggtgaagatggtggccttgggcatctttgggaaaaagtgtkacctgggagacacttggaaccggsttgactttttcatcgtcatcgcagggatgctggagtactcgctggacctgcagaacgtcagcttctcagctgtcaggacagtccgtgtgctgcgaccgctcagggccattaaccgggtgcccagcatgcgcatccttgncacgntgctgctggatacgctgccatgctgggcaacgtcctgctgctctgcttcttcgtcttcttcatcttcggcatcgtcggcgtccagctgtggg

SEQ ID NO: 206 - DNA, 580 bp, Homo sapiens
  SITE (140): n equals a,t,g, or c
  SITE (368): n equals a,t,g, or c
  SITE (571): n equals a,t,g, or c
  SITE (574): n equals a,t,g, or c
ggcagagcgtggccgccgcacaagctgcgctcgtctctcggctggggagctccgtgtcgcaccgggttcttgggctggccgtgtccttctccctcggtcgccactggcccatgagtccccatggcgacggcaggggccangcccaggggcgggcagtccgagtggggctgcggcgctccgggggcatccgcggcggcgtggcggtgttcgcgcctggccgcagtgttcaccttcaccctgcccccttcggtaccggggggagactccggggaactgatcacagccgcacatgagcttggagttgcccatcctcctggctatcctttgttcactctggtggctaaactggcaattacactgtttccttntggttcaattgcctaccgcgtcaatcttctctgtggcttatttggagcagtagctgcatcattactttttttcaccgttttcaggctttctggctcatctgctggaggaatccttgctgcgggggtgttttcattttctcgtctaacatggcagtggtccattgcagcagaggttttagcttaaaacaatctctttgtggggntgntatggg

SEQ ID NO: 207 - DNA, 957 bp, Homo sapiens
  SITE (13): n equals a,t,g, or c
cccgcggtggcgnccgctctagaactagtggatcccccgggctgcaggaattcggcacgagattttgctccggagcgtccagagtcctggccctgagcgggaatcgcagtggccgaggctgagcggcaggcggatcgccccgaccctcactcctggcgtctgagtctctggcgtagcccatgctgagtgggcggctggtcctgggtctggtctccatggctggccgcgtttgtttgtgccagggcagcgcgggatccggggccatcggtccggtggaggccgccattcgcacgaagttggaggaggccctgagccccgaggtgctagagcttcgcaacgagagcggtggccacgcggtcccgcctggcagtgagactcacttccgcgtggctgtggtgagctctcgtttcgagggactgagccccctacaacgacaccggctggtccacgcagcgctggccgaggagctgggaggtccggtccatgcgctggccatccaggcacggacccccgcccagtggagagagaactctcagctggacactagccccccatgcctgggtgggaacaagaaaactctaggaaccccctgaaccccaagagagggaggaccaggatccgaatgggctgggtgagcacgaattaccgaggccttccctttgatacagtccaggatttgtaagggatgaagacccctgggccccattctgttggggtccatacatactctccgaagatagcaacttgcttcaggtcaaagtgaacccgagaaaagagaagaatcactcactactgctcttgccctggactattcaggaagggcagcccggatgttccatgttaaatcgtgacagaattgcaccagacctgatgagttggaaacaatcctatacattaaaagaaattacactatgaaaaaaaaaaaaaaagggcggcgctcgcgactagaacgcgagc

SEQ ID NO: 208 - DNA, 654 bp, Homo sapiens
  SITE (466): n equals a,t,g, or c
  SITE (524): n equals a,t,g, or c
  SITE (554): n equals a,t,g, or c
  SITE (619): n equals a,t,g, or c
  SITE (637): n equals a,t,g, or c
  SITE (649): n equals a,t,g, or c
gcatggttcttgctcaagtaccaactctatggacccaggacaggtttgtcccatgacctgctgtgaacagtgtgttgtctgatagaagattcggttggcaaaccatctctctattgccttacagagcaagcaaagaagatggatcgattgaagagccatctgactgtgtgctttctaccttctgtgccctttttaatcctagtatccactctagccaccgctaagagtgtgactaacagcactttaaatggcactaacgtggtcttgggctctgtgcccgtaatcattgccagaactgaccatatcatagtcaaggaagggaacagtgccttgattaactgtagtgtttatggcatccctgacccacagttcaagtggtataattccattggcaagctgctgaaagaagaagaggatgagaaggagagaggaggaggaaaatggcaaatgcacgacagcggcctcntgaacatcaccaaggtatccttctcagaccgaggtaaatacacgtgtgtggcttctancatctacggcaccgtgaacaacacggtgancttgcgcgtcatcttcacttctggggacatggggtgtctactacattggtcgtgtgcctgggggncttcacatccgtcatggncctcaatatcancccgc

SEQ ID NO: 209 - DNA, 1125 bp, Homo sapiens
ccacgcgtccgctgactgtgagtggccccagcaccgtgatgggcgccgtgggggaatccctgagtgttcagtgtcggtatgaagagaaatacaagacgtttaacaaatactggtgcagacaaccatgcttgccaatttggcatgaaatggtggagaccggagggtctgagggagtggtgaggagtgaccaagtgatcatcacggaccatcctggagacctcaccttcaccgtgaccttggagaacctcacggcagacgatgcaggaaaataccgatgtgggattgcaacaatactgcaggaagatggcctgtctggtttcctgcccgatcccttcttccaggttcaagtgctggtctcatcggcctccagtactgagaactctgtgaagacacctgcatctcccaccaggcccagccaatgccaagggtccctgcccagcagcacctgcttcctgcttctcccactcctgaaggtgcctctgctcctgagcatactcggtgctatcctctgggtgaacaggccttggaggactccttggacagagtcatgaacaggagaacttgcaacaccccatgcccattgaaaccctgtccagagacacagcccctctgactgcaaaaaggacttctgaccctgaccctcatatttctttccatcttatcaccggatactttttaaaagttaaaaaaaaatgtaggccgggtgcggtggcttacacctgcaatcccagcactttgggaggccaaggcaggtggatcacttgagtccaggagtttgagagcagcctgggcaacatggtcagacctcatctctacaaaaaaatacaaaaattagcagggtgtggtggtgtatgcctgtgatcccagctacttgggaagctgagacaggaggatcgcttgagccccggaggtggaggttgcattgagtcgagattgtgccactgcactccagcctgggtgacagagggagaccctgtctcagataaacaaataaataaataaaatacatcccatacaaaaaaaaaaaaaaaaaaaaaaaaaaaaaaaaaaaaaaaaaaaaaaaaaaaaaaaaaaaaaaaaaaaaaaaaaaaaaaaaaaaaaaaaaaaaaaaaaaaaaaaaaaaaa

SEQ ID NO: 210 - DNA, 2616 bp, Homo sapiens
agtagagccgatctcccgcgccccgaggttgctcctctccgaggtctcccgcggcccaagttctccgcgccccgaggtctccgcgccccgaggtctccgcggcccgaggtctccgcccgcaccatgcggctgggcagtcctggactgctcttcctgctcttcagcagccttcgagctgatactcaggagaaggaagtcagagcgatggtaggcagcgacgtggagctcagctgcgcttgccctgaaggaagccgttttgatttaaatgatgtttacgtatattggcaaaccagtgagtcgaaaaccgtggtgacctaccacatcccacagaacagctccttggaaaacgtggacagccgctaccggaaccgagccctgatgtcaccggccggcatgctgcggggcgacttctccctgcgcttgttcaacgtcaccccccaggacgagcagaagtttcactgcctggtgttgagccaatccctgggattccaggaggttttgagcattgaggttacactgcatgtggcagcaaacttcagcgtgcccgtcgtcagcgccccccacagcccctcccaggatgagctcaccttcacgtgtacatccataaacggctaccccaggcccaacgtgtactggatcaataagacggacaacagcctgctggaccaggctctgcagaatgacaccgtcttcttgaacatgcggggcttgtatgacgtggtcagcgtgctgaggatcgcacggacccccagcgtgaacattggctgctgcatagagaacgtgcttctgcagcagaacctgactgtcggcagccagacaggaaatgacatcggagagagagacaagatcacagagaatccagtcagtaccggcgagaaaaacgcggccacgtggagcatcctggctgtcctgtgcctgcttgtggtcgtggcggtggccataggctgggtgtgcagggaccgatgcctccaacacagctatgcaggtgcctgggctgtgagtccggagacagagctcactggccacgtttgaccggagctcaccgcccagagcgtggacagggcttccatgagacgccaccgtgagaggccaggtggcagcttgagcatggactcccagactgcaggggagcacttggggcagcccccagaaggaccactgctggatcccagggagaacctgctggcgttggctgtgatcctggaatgaggccctttcaaaagcgtcatccacaccaaaggcaaatgtccccaagtgagtgggctccccgctgtcactgccagtcacccacaggaagggactggtgatgggctgtctctacccggagcgtgcgggattcagcaccaggctcttcccagtaccccagacccactgtgggtcttcccgtgggatgcgggatcctgagaccgaagggtgtttggtttaaaaagaagactgggcgtccgctcttccaggacggcctctgtgctgctggggtcacgcgaggctgtttgcaggggacacggtcacaggagctcttctgccctgaacgctcccaacctgcctcccgcccggaagccacaggacccactcatgtgtgtgcccacaagtgtagttagccgtccacaccgaggagcccccggaagtccccactgggcttcagtgtcctctgccacattccctgggaggaacaatgtccctcggctgttccggtgaaaagttgagccacctttggaagacgcacgggtggagtttgccagaagaaaggctgtgccagggccgtgtttggctacaggggctgccggggctcttggctctgcagcgagaaagacacagcccagcagggctggagacgcccatgtccagcaggcgcaggcctggcaacacggtccccagagtcctgagcagcagttaggtgcatggagagggtatcacctggtggccacagtcccccttctcacctcagcaatgatccccaaagtgagaggtggctcccccggcccccaccaccctcagcagccccaccccactcaaccctgagggtccccagggtcctgatgaagacctccgaccccagcgccaggctcctcggagcccaacagtcccaagggggcaggagacggggtggtccagtgctgaggggtacagccctgggccctgaccagccccggcacctgccatgctggttcccggaatgaatcagctgctgactgtctccagaagggctggaaaggatgctgccaggtgacccgaggtgcactcgccccagggagatggagtagacagcctggcctggccctcgggacacattgtctgccccggggctatgggcaaatgcccctccttcttacttcccagaatcccctgacattcccagggtcagccaggacctgttacagccctggtcacttggaactgacagctgtgtgaggcctgcacttctcagacccagacttagaacaaaaggaggagtgaggactcaaggctacaatgaggttccagtacttgttacaagaaattggttttctgcaaaaaaagtccctacctgagcctttaggtgaatgtgggatccactcccgcttttaacatgaaagcattagaagatgtgtggtgtttataaaaaaaaaaaaaaaaaaa

SEQ ID NO: 211 - DNA, 3802 bp, Homo sapiens
cctttcaagtcaacttcagatgtcactgacaaacttactatagactggacatatcgccctcccagcagcagccacacagtatcaatatttcattatcagtctttccagtacccaaccacagcaggcacatttcgggatcggatttcctgggttggaaatgtatacaaaggggatgcatctataagtataagcaaccctaccataaaggacaatgggacattcagctgtgctgtgaagaatcccccagatgtgcatcataatattcccatgacagagctaacagtcacagaaaggggttttggcaccatgctttcctctgtggcccttctttccatccttgtctttgtgccctcagccgtggtggttgctctgctgctggtgagaatggggaggaaggctgctgggctgaagaagaggagcaggtctggctataagaagtcatctattgaggtttccgatgacactgatcaggaggaggaagaggcgtgtatggcgaggctttgtgtccgttgcgctgagtgcctggattcagactatgaagagacatattgatgaaagtctgtatgacacaagaagagtcacctaaagacaggaaacatcccattccactggcagctaaagcctgtcagagaaagtggagctggcctggaccatagcgatggacaatcctggagatcatcagtaaagactttaggaaccacttatttattgaataaatgttcttgttgtatttataaactgttcaggaactctcataagagactcatgacttcccctttcaatgaattatgctgtaattgaatgaagaaattcttttcctgagcaaaaagatactttttgattcatctttgctctggaatgtattacatgttttcttccaactgtttgaaggagaattttgaatgtttgccacaccgctgatacccaaataattttttaaatgaagtggagcttgtggcttcctgatgtgtcaccagacaaaatattcgcttgggatatgtattctttgttttttgctccatgtacactttcagctgtgagttagtatagggcgtatacttaccggtttaatgacctcaacctcagttgtgtttggataacttagggtgtatacccttagtttccttagagttggtaggatcaagtcattggtttgctttgactgggtttttaaagtattaagtacagtgtcatcaatttacagttaaggaaaggaatcgtgaagtagaaaaattattttctttagtcttgctggtacaatttgggctaaggagtctttgttattttctgtcttgcttttttttttttttttttttttttgaggcagagtctcactctgtcgccaggctggagtgcagtggtgtgatcttggctcactgcaacctctgcctcctgggttcaagcgattcttgtgcctcagcctctcgagtagctgggattacaggcatgcgccaccacacccagctaatttttgtgtttttagtagagacggggtttcaccattttggccaggatggtctcaatcccctgacctcgtgatccacctgcctcggcctcccaaagtgttgggattacaggcatgagccactgtgcttggcctgttattttattttcttataactacaacttttcttcttgaattttcaggtcagaggcaagaaaaactctttacaggtttttagtggggggcttatggagtatttcaggagttctttgcaaattaaatcatcttttcacttgtattgtttttcaaaactttgttgatttctaaaatgtgccaactgtgagtaaactatggtatttgcaagtggtttttacataatatttgagatgaggaagtgagattgtgcatgacatacttctcctttgtattctctcagtgccttacagcaggttactccattctgctatgacaacttgtttcaaatgttaatttacataggattttttataagccattaaggcatatgtatagtatatcagtaaagatggatggtgcatatataaatagtcttctgtaatagtgattggatttacttctcaattatgagagacaaaattatcccctcacctgtctctattctttcaacaggttgatcccttttcatgatttttcattaggtggttcaggaagtttccatattacagcgcttcagactgtatatgttagtttaaaaatcacttttctctctctcaacttctttcttttttttttgaagacttaatttaaaaaatttgggttgttagatccgtatcatagatttggcctagcctcttctgttaacctagtccacagatgagcgaatctggttagttgaaggacattgtgatttgactctggtcacgcgaggaagtagaagggcaaagacaggaccggcagtttacatttccagtggttaaacctcacggtactttgggactgcttgttaacttttgtggttgtctgaggccaatctaacgtgaccatttctgacacctcaacagagagaggaaagcaacttgagcaatgagagtaaataacttgggctctcagagatttgaagatagagatctcattgtgagggggactattttgcaggtcctcatttctccaagaaagagatggtgttacaggaacccactgaaagccatatcccattaaatgaggaactaattttggctgggccttcttgtaatgtcctcgcaggtgtgttgtgaagattaatgcagggtagtatgtttgtagattgacacctagtctaaacttgaggtaattggtgctctgtgaatactcagtcgtgttcttttatagccttaatcatgatttgaactagtcccttgctttttaaatgactgaatgaagtccttcgtggtaagggagtacgttgataacttagtttactatatgggtttgtggtcgcatcccagtcatcagctgctatcattttccttcttcatcccttatactgagatttgggttacagctttttattcttcgaaggatcacaaagcagtgtacagacacctgccttctttaaggatgaaaggaagataaagtggtctttttttgtttacttatttgtttcacctcttgtttgagtaacttctaaggtgctattctctctctctttttgctacctcatgagctcttgtcacagccatggaaaccagcctcgtttagaaagggaacttagttcagaaggggttaaaagccttccagaatttttctttagctgctgaagtttttacatgtggttacatgactttaagttttatgcattacgctcttaattctattacaaaatgtggactcaccaattgctttgtgttttccatgtgacctgttacttcaggctacttggggaacatcttagtcctctgtagctcctgaacccagcactggtgcttcaagagagaaggtagcacgtctttgttcaaaacaaaacaaaacgacacttctggaggccacatcctgaatatgaatgttctactaagtcactcagttatggttctaaagggaaactgtaagaagacccacaaggagtggaccaagactattatttaattgcacaacttgaaactttgctgccagaagaggcagctccattcctttgactccagtgttgggctgttaactgctgcacctcattgcctttttttgtttttgtttttgttttgtaggagggtaggcactgttgggccatatgcacaaatattgtaactcttggtatctttactgcatcatagtcaataaacttctttgtaccctttggcaaaaaaaaaaaaaaaaaaaaaaaaaaaaaaaaaaaaaaaaaaaaaaaaa

SEQ ID NO: 212 - DNA, 1271 bp, Homo sapiens
  SITE (24): n equals a,t,g, or c
  SITE (30): n equals a,t,g, or c
  SITE (61): n equals a,t,g, or c
  SITE (1243): n equals a,t,g, or c
attgggtacgggccccccctcgantttttnttttttttttttctccagtatgaagtttgtnatgtagtcgaaggcctgtactacacagaaaggcctgaccacattccttacactcatagcacttctcagcaatgttcagtctctgatgtcgagtaaggtgtgcatactgcctaaaggccttcccacattctttacattcatagggtttctcacccgtgtgaatcctttgatggagattaagttgtcctctaactctaaaggctttcccacattctttacattcatacggcttctcaccaatatgaattctctgatgtactcgaaggtctgagccacatgtgaagatctttccacattttttacattcatagagtttgtcagaagtatgaattctctgatgtcgactgaggtgggcacactgtctaaaggcttttccacattctttacattcatagggtttctcaccagtatgaattctttgatggaaagtaagttgttgtcgtactctaaaagccttcccacattccccacattcgtagggtttctctctgttatgacttttctgatacagaggaagagatgtgagttttctgtaagtaggcattttttcagaaggtggtttttgtcacttgcctgaaacacacctcatgaggactttcttgttcttcaagtccacagcttttaattctttccattaccttccactgagataagttcatttcataaatatcctttccttgaaataactttttagtgtcatatctggattccaaatctagagtccatcttcttttctcatccctcacaaccayccagggctctttcccttgttccaatagggtgatcacatctggcttagaaatagaacatcctgccagtgacaccaagttgctatagttctctaatatcacatctctgtacaaattcctctgatatgagttcaggcattcccattcttcctgagaaaagtctacagccacatctctgaacatcaccaaatcacgagccatgattttagaactgctagaactggtcaattttcctcaaggttcatgtacttyagaagcagggtccacagacaccagagagggaaccggcttttagaagagcagcagcgattcgtttctccttytcaagcgccttctytggaaactggcagggctggggaagcaggcagagttcaggacaccccaggcttttctcctgcagcccgggggatccactagttctagagcggccgccnccgcggtggagctccagcttttgttccc

SEQ ID NO: 213 - DNA, 1730 bp, Homo sapiens
cgcgagctgttgttgaagcgcttcccgcactgggtgcaggcatagggccgctccccgctgtgtgtcctgcggtggatgaccaggctggagctctggctgaagcgcttcccacactcggggcacgggtagggcttctcgcctgtgtgcaccctctggtgcgtgctgaagttggagcggtcgctaaagcccttcccacagactaggcacttgtaaggccgctcgcccgtgtgtgtgcgctggtgcttggtcaagtgggacgtcttgctgaagcctttgccacattcggggcaggtgtacggcttgtcagccccatgggaagcccgtcttcctggtggggggccgcctcttggctgatcaggcctgaccaagcccctgactggggctggcctctgacctgggagcgggtggccaggcccctggcatcgtgccgagagcactcggtaccactccattctcaacggggcatcctccctgccatcaccgccgtcctccaactggatcccaggtccttcattctccagcggcgcgtcccgctgagctgggtccatgcatcttggctcctccccagaaaggtatacagccacgtcctccaagttcacgggcacctgggaccaggccgaaaggaagggcgaggctgacgccatctcctgatgccggggagctggagggcctctctctggccacaacagcgggcccctctgtggcctgtggctcagctgggctgggggctgctggctggagaatcgagcctcttcctccagggacagatcctctggctgagcctctgcctggtgttttaagaactgtccccctatcccgaggggcacctcgtcatcagaaagcagctctgagcccctctattccttggtcctcctgatagaccctgggatagaccctgggccagaagagccctgagtcagcgctggactaatttcagaagttcacagaactgcatttgctagattttttgaaattatctggccagctgcaatggctcacacctgtaattccagcactttgggaggccgaggtgggtggatcacctgaggccaggagttcgagaccagcctaaccaacatggtgaaaccccatctctactaaaaatacaaaaattagccaggcatggtggcagcacgcttgtaatcccaggtacttgggaggctgaggcaggagaatcgcttgaactcgggaagtacaggttgcagtgagccgagatcgtgccactgcactccagcctgggcaaaagagcgagactccatctcagggaagaaaaaaaaaaaaaaagaaaaaaaaagaaattatcaacaggtgctctgagatgatctatttcctaattccaggaaaggtgagttgaatgaaattgggtcttagaattgagctctgcaatagcacttggacaagagacatccctaggcaactacaaacccagcgtcagggacccatctcaggcttcctcttattcaacattccacacctctaagggagcgtagtccccttggggagcacagcctgcccctctcagctcagtgatggccatgaggcatgtgtgcagaggtgtcggtgcagtgacagaaggaagccatgccgggaaccccaaacactgtgaagctgtggtggccaggaaagaggctggccggctgggaagaaaccccgatttcttggccaccccgatggcaggattttctgactgcggtcagctcacgccgtggtcaagcattaggggatgtgcc

SEQ ID NO: 214 - DNA, 3804 bp, Homo sapiens
ggcacgaggtgttccagtagaatgtccccaacctgagaaaatccccaatggaatcattgatgtgcaaggccttgcctatctcagcacagctctctatacctgcaagccaggctttgaattggtgggaaatactaccaccctttgtggagaaaatggtcactggcttggaggaaaaccaacatgtaaagccattgagtgcctgaaacccaaggagattttgaatggcaaattctcttacacggacctacactatggacagaccgttacctactcttgcaaccgaggctttcggctcgaaggtcccagtgccttgacctgtttagagacaggtgattgggatgtagatgccccatcttgcaatgccatccactgtgattccccacaacccattgaaaatggttttgtagaaggtgcagattacagctatggtgccataatcatctacagttgcttccctgggtttcaggtggctggtcatgccatgcagacctgtgaagagtcaggatggtcaagttccatcccaacatgtatgccaatagactgtggcctccctcctcatatagattttggagactgtactaaactcaaagatgaccagggatattttgagcaagaagacgacatgatggaagttccatatgtgactcctcaccctccttatcatttgggagcagtggctaaaacctgggaaaatacaaaggagtctcctgctacacattcatcaaactttctgtatggtaccatggtttcatacacctgtaatccaggatatgaacttctggggaaccctgtgctgatctgccaggaagatggaacttggaatggcagtgcaccatcctgcatttcaattgaatgtgacttgcctactgctcctgaaaatggctttttgcgttttacagagactagcatgggaagtgctgtgcagtatagctgtaaacctggacacattctagcaggctctgacttaaggctttgtctagagaatagaaagtggagtggtgcctccccacgctgtgaagccatttcatgcaaaaagccaaatccagtcatgaatggatccatcaaaggaagcaactacacatacctgagcacgttgtactatgagtgtgaccccggatatgtgctgaatggcactgagaggagaacatgccaggatgacaaaaactgggatgaggatgagcccatttgcattcctgtggactgcagttcacccccagtctcagccaatggccaggtgagaggagacgagtacacattccaaaaagagattgaatacacttgcaatgaagggttcttgcttgagggagccaggagtcgggtttgtcttgccaatggaagttggagtggagccactcccgactgtgtgcctgtcagatgtgccaccccgccacaactggccaatggggtgacggaaggcctggactatggcttcatgaaggaagtaacattccactgtcacgagggctacatcttgcacggtgctccaaaactcacctgtcagtcagatggcaactgggatgcagagattcctctctgtaaaccagtcaactgtggacctcctgaagatcttgcccatggtttccctaatggtttttcctttattcatgggggccatatacagtatcagtgctttcctggttataagctccatggaaattcatcaagaaggtgcctctccaatggctcctggagtggcagctcaccttcctgcctgccttgcagatgttccacaccagtaattgaatatggaactgtcaatgggacagattttgactgtggaaaggcagcccggattcagtgcttcaaaggcttcaagctcctaggactttctgaaatcacctgtgaagccgatggccagtggagctctgggttcccccactgtgaacacacttcttgtggttctcttccaatgataccaaatgcgttcatcagtgagaccagctcttggaaggaaaatgtgataacttacagctgcaggtctggatatgtcatacaaggcagttcagatctgatttgtacagagaaaggggtatggagccagccttatccagtctgtgagcccttgtcctgtgggtccccaccgtctgtcgccaatgcagtggcaactggagaggcacacacctatgaaagtgaagtgaaactcagatgtctggaaggttatacgatggatacagatacagatacattcacctgtcagaaagatggtcgctggttccctgagagaatctcctgcagtcctaaaaaatgtcctctcccggaaaacataacacatatacttgtacatggggacgatttcagtgtgaataggcaagtttctgtgtcatgtgcagaagggtatacctttgagggagttaacatatcagtatgtcagcttgatggaacctgggagccaccattctccgatgaatcttgcagtccagtttcttgtgggaaacctgaaagtccagaacatggatttgtggttggcagtaaatacacctttgaaagcacaattatttatcagtgtgagcctggctatgaactagaggggaacagggaacgtgtctgccaggagaacagacagtggagtggaggggtggcaatatgcaaagagaccaggtgtgaaactccacttgaatttctcaatgggaaagctgacattgaaaacaggacgactggacccaacgtggtatattcctgcaacagaggctacagtcttgaagggccatctgaggcacactgcacagaaaatggaacctggagccacccagtccctctctgcaaaccaaatccatgccctgttccttttgtgattcccgagaatgctctgctgtctgaaaaggagttttatgttgatcagaatgtgtccatcaaatgtagggaaggttttctgctgcagggccacggcatcattacctgcaaccccgacgagacgtggacacagacaagcgccaaatgtgaaaaaatctcatgtggtccaccagctcacgtagaaaatgcaattgctcgaggcgtacattatcaatatggagacatgatcacctactcatgttacagtggatacatgttggagggtttcctgaggagtgtttgtttagaaaatggaacatggacatcacctcctatttgcagagctgtctgtcgatttccatgtcagaatgggggcatctgccaacgcccaaatgcttgttcctgtccagagggctggatggggcgcctctgtgaagaaccaatctgcattcttccctgtctgaacggaggtcgctgtgtggccccttaccagtgtgactgcccgcctggctggacggggtctcgctgtcatacagctgtttgccagtctccctgcttaaatggtggaaaatgtgtaagaccaaaccgatgtcactgtctttcttcttggacgggacataactgttccaggaaaaggaggactgggttttaaccactgcacgaccatctggctctcccaaaagcaggatcatctctcctcggtagtgcctgggcatcctggaacttatgcaaagaaagtccaacatggtgctgggtcttgtttagtaaacttgttacttggggttactttttttattttgtgatatattttgttattccttgtgacatactttcttacatgtttccatttttaaatatgcctgtattttctatataaaaattatattaaatagatgctgctctaccctcacaaaatgtacatattctgctggctattgggaaagttcctggtacacatttttattcagttacttaaaatgatttttccattaaagtatattttgctactaaataaaaaaaaaaaaaaaaaaaaaa

SEQ ID NO: 215 - DNA, 540 bp, Homo sapiens
gctcgtgccgcggccgctgtcagtgccgcgagcgtacgttcggcgcgcgctgcgatcgctactgccagtgcttccgcggccgctgccaccctgtggacggcacgtgtgcctgcgagccgggctaccgcggcaagtactgtcgcgagccgtgccccgccggcttctacggcttgggctgtcgccgccggtgtggccagtgcaagggccagcagccgtgcacggtggccgagggccgctgcttgacgtgcgagcccggctggaacggaaccaagtgcgaccagccttgcgccaccggtttctatggcgagggctgcagccaccgctgtccgccatgccgcgacgggcatgcctgtaaccatgtcaccggcaagtgtacgcgctgcaacgcgggctggatcggcgaccggtgcgagaccaagtgtagcaatggcacttacggcgaggactgcgccttcgtgtgcgccgactgcggcagcggacactgcgacttccagtcggggcgctgcctgtgcagccctggcgtccacgggccccactgta

SEQ ID NO: 216 - DNA, 467 bp, Homo sapiens
  SITE (428): n equals a,t,g, or c
  SITE (467): n equals a,t,g, or c
ggcacgagtacgagttcaaagtgagaccatcctctggccgggytcgaggccctgacagcaacgtgctgctcctgaggctgccggaaaaagtgcccagtgccccacctcaggaagtgactctaaagcctggcaatggcactgtctttgtgagctgggtcccaccacctgctgaaaaccacaatggcatcatccgtggctaccaggtctggagcctgggcaacacatcactgccaccagccaactggactgtagttggtgagcagacccagctggaaatcgccacccatatgccrggctcctactgcgtgcaatggctgcagtcactggtgctggagctggggagcccagtagacctgtctgsctccttttagagcaggccatggagcgagcacccaagaacccatgagcatggtccctgggacctggancagctgaaggctacttggaagcggctgaagtcatgccan

SEQ ID NO: 217 - DNA, 641 bp, Homo sapiens
  SITE (578): n equals a,t,g, or c
  SITE (624): n equals a,t,g, or c
  SITE (626): n equals a,t,g, or c
  SITE (633): n equals a,t,g, or c
  SITE (640): n equals a,t,g, or c
ggtggagtaagccagaaggctgttcacccgaggaagtgatcacctacaccttggaaattcaggaggatgaaaatgataaccttttccacccaaaatacactggagaggatttaacctgtactgtgaaaaatctcaaaagaagcacacagtataaattcaggctgactgcttctaatacggaaggaaaaagctgtccaagcgaagttcttgtttgtacgacgagtcctgacaggcctggacctcctaccagaccgcttgtcaaaggcccagttacatctcatggctttagtgtcaaatgggatccccctaaggacaatggtggttcagaaatcctcaagtacttgctagagattactgatggaaattctgaagcgaatcagtgggaagtggcctacagtgggtcggctaccgaatacaccttcacccacttgaaaccaggcactttgtacaaactccgagcatgctgcatcagtaccggcggacacagccagtgttctgaaagtctccctgttygcacactaagcattgcaccaggtcmatgtcgaccaccgagggtttgggtagaccaaagcacaaanaagtccacttagagtgggaatgttcctgcatcggaaagtggctgtnangtctcanagtacanc

SEQ ID NO: 218 - DNA, 2059 bp, Homo sapiens
ggcacgagagaaagagacaaagagcccctacaggaacgctttttccgaccacatttcctgcaggctcctggggatatggtagctcatgaggggcgcctctgtcggctggactgtaaggtgagtggtttaccgcccccggagctgacatggctactcaatggccaacctgtgctaccagatgcctcccacaagatgctggtcagggagaccggagtccactctctgctcattgacccactcactcagcgcgacgcagggacctataagtgcatcgctaccaacaaaaccgggcagaattcttttagtctggagctctctgtagtagccaaagaggtgaagaaagcacctgtgatcctggagaaactacagaactgcggtgttcccgaaggccaccccgtgagactggagtgccgcgtgataggcatgcccccacctgtgttctactggaagaaagacaatgagaccatcccttgcaccagagagaggatcagtatgcaccaggacacaacagggtatgcctgccttctcattcagccagccaagaaatcagacgctggatggtacacgttgtcagccaagaatgaagccggcatcgtgtcgtgcactgccaggctggatatatacgctcagtggcaccatcagatcccaccgcccatgtctgtccggcccagtggcagtcgctacggatctctcaccagtaaaggacttgacatattttctgccttttcctccatggaaagcacgatggtgtattcatgctcttctcggagtgtagtggagagtgatgaactttaagaatgtctaggtacctgctgtgtaagagagcggactgtggagggggaatgagaacaagccagacttggtggtttccaagcaaccgaagttgagtaagttcccacactgctggacctgtggcaaagagtgctttgaataagtcagctagggattcttgcagtctcagctgagggagaaaggtagggctgtgccttctaaagattccaacagagatgtgagaagataatacagatgaaccaaagatgtcacacagttgccatccactgctttgggaaaaaactagcatgctcccctgctccctgttgtgttagggatgtttaggtcatactaggagcaattaggagccatatgcctgggctgagaagagctaggcagtagtgaccttaggatatgactaactcaccaaacaatgccaaggagaaaggcggacaggtcaccatcacctttcatcgattacatgtatagcagtagttttggtgaattcaccaaatcagcttccacttagcattaggaggtcatgccatacaactcacgtatgcgggcaaacacttttgatttgcatatcctgggtgtactgagccacataataaggtgtcaaaatgtgcttgagattccaaaaacttgctgaaacacttgatattgcacagtgcacttattttgtggccaaagcatggccttaccagcttgtctgcactattttcttttgggtggtgactgtttttttctgactttgcatatccctagacactagaactaaaggattggtaataaaccaatcagaaagaaatcctctgtggggtcactttaaaaactactagcttcaactaccacttacaaaatgtgcaagagtcatcatttgcccataaaatacacctcatgggctcctacccctttccccaaaagtctgaaagtgtaggaggaaggaagagatacaaacaaggagaggaaatgatgggagagtgttgtttttgtcacttgccccagcagagcaggggttttggaaggagaggtctttaatagctttgaaatgctttgagatcattggtcaaattgcattttctatgtagagaatattctgctaggtggaaaagttgggagaaaggggaatatgcatctttattctaatcaccaattcaaaccctgcctcttaaggaatttttagacttaagttcactgtgatatccctagtacctagaagagtacctagcacaaagtagacattcaataaatatttgctggttgaatgaaaaaaaaaaaaaaaaaa

SEQ ID NO: 219 - DNA, 1979 bp, Homo sapiens
  SITE (1956): n equals a,t,g, or c
  SITE (1957): n equals a,t,g, or c
  SITE (1958): n equals a,t,g, or c
  SITE (1959): n equals a,t,g, or c
  SITE (1962): n equals a,t,g, or c
  SITE (1963): n equals a,t,g, or c
  SITE (1964): n equals a,t,g, or c
aaaacaggcttggctggtcttgaaaatcggcatcttagtgaacaacgtgrgaatgtcgtatgagtatcctgaatactttttggatgttcctgacttggacaatgtgatcaagaaaatgataaatattaatattctttctgtttgtaagatgacacaattggtactgcctggcatggtggaaagatccaaaggggctattctgaacatttcatctggcagtggcatgctccctgtcccactcttgaccatctattctgcaaccaagacttttgtagatttcttctctcagtgcctccatgaggagtataggagcaagggcgtctttgtgcagagtgtcctgccatacttcgtagctacaaaactggctaaaatccggaagccaactttggataagccctctccggagacgtttgtgaagtctgcaattaaaacagtcggcctgcaatcccgaaccaatggatacctgatccatgctcttatgggctcgataatctcaaacctgccttcttggatttatttgaaaatagtcatgaatatgaacaagtctacacgggctcactatctgaagaaaaccaagaagaactaagcattgataactgcattgtaacttggccagatgctccagcatatgcacgttcactgcaaagcaccctactggttttgaaaatctgaccttgtcatttcaatagttattaacatgactaaatattatcttaattaagaggaaaatagaagttgcttttaggggtttctgacatatattctggatactatccgaggtaattttgaagtttaatataaatgctcatatcaaatgaatatagaactaatattgtcgggaacacctaatagaaaggaatactattatagcaaatcacagaatgatagactcaagcataaaacttggcagttttatctgcttcaaaatgccattgatcattattcctgtattttctctgaaactgattataaaaaccaatgtccagctactcttttgtttttgacacttgaagaaatggagatcgatttgatttgtttataagcagacacactgcaatttacaaagatctctttacggttttataaaattatcttccagtttgtacatttatatggaattgttctttatcaagggtagctaatgacatgaaaataattgtgaaatatggaattatttctgacacatgaagcccactaaactatgctttcttataatgcatatttcttctcagtttaaatgtatgtaaatatcgaagctatatggtatgatttataaagataaatgggccaaagtgtacattgagactggcagccatctatggtaccactgaaaccctgacccagaaaagtggcttgcttggacacccagctgcctttgtttctgcattaaaccaatattgatcacacatatgacacaggctagtcctataaaagtaatgacttcatagaaatggcattataatttttaagttgatactctacaggtagctattgatataattagttttaataaaacatgctgcaaccatggtatacaacaaaaatacatttctttggtgattgaaattaaggccgtatttacaatgacttaatataagactgacttttatcctgcttcataacttgtatggagaactcaccaagaaagaattcaatactgtgaaatatgcagcaagaagattggtctttacctaggctgtgtttcctaagctctgagttttcagcaccagtagatttgtattaaaagaaaaaaaaatggggccttagcttctggcttttaattttgccagctaaggacataaaacaaaaataaacaaacaaaaacaaatagccatctgctatcagcatcattatgtaaaagaaaatatattttagcccctaaaattaggaagaatgtaatctcagaataaaggttgtcatttaagttgaataaatatatagctttatgaaaaaaannnnctnnnccccccccctcctcc

SEQ ID NO: 220 - DNA, 1204 bp, Homo sapiens
  SITE (1196): n equals a,t,g, or c
gggaaaagccactaaatgacactgtyactgaatatgaagttatatccagagaaaatgggtcattcagtgggaagaacaagtccattcaaatgacaaatcagacattttccacagtagaaaatctgaaaccaaacacgagttatgaattccaggtgaaacccaaaaacccrcttggtgaaggcccggtcagcaacacagtggcattcagtactgaatcagcggacccaagagtgagtgagccagtttctgcaggaagagatgccatctggactgaaagaccctttaattcagactcttactcagagtgtaagggcaaacaatatgtcaaaaggacatggtataaaaaatttgtaggagtgcagctgtgcaactctctcagatacaagatttacttgagcgactccctcacaggaaaattttataacataggtgatcagaggggccatggagaagatcactgccagtttgtggattcatttttagatggacgcactgggcagcaactcacttctgaccagttaccaatcaaagaaggttatttcagagcagttcgccaggaacctgtccaatttggagaaataggtggtcacaccaaatcaattatgttcagtggtatgaatgtgggactacaattcctggaaaatggtagatgctgcacaaagttaccttctgtttcatcattgcaaacaaaaatcattgaaaatactatgccgcattcatttaaagctattttgtttactatgtataaaagtctacaatctaattaatagcaatactagatgtttattattagaaaagattgctgagagtatttatcaggttttacaaagtcattttaagaaagcaagatactgatgttaacagaataacatttttggggaagctggctccctattcatggtattttaagagatcatttgtatattatttatcacactgttgtaatgatgttttgagatacttttataacaaaattaacatcaaaaaggtatatactttttaaaaaaaatttacttttattgatgtgtactcttcctattgatgagttaattccataaatctctacttagtttaacttattggatcaaattatcttcagcatgtatatctgggaaaaaaagggccgattttcacatttatatttaaacttcaattttttatatttaaacttcaatttttagcaacagctgaatagnttttgcgg

SEQ ID NO: 221 - DNA, 2985 bp, Homo sapiens
  SITE (1876): n equals a,t,g, or c
ggcacgagtgaaggaatttctggactcactggcctctaaggggccagaagcccttcaggagttccagcagacagccaccactaccatggtgtaccaacagggtgggaactgcatatacacagacagcactgaagtggctgggtctttgcttgaacttgcctgtccagtcaccaccagtgttcagccacaaacccagcaagaacagcagatccaggttcagcagccgcagcaggttcaggtccaggtgcaggtacagcagtctccgcaacaggtctcggctcagctctccccacaactcaccgttcaccagcctactgagcaacccatccaggtccaggtgcagatccaaggccaggcaccacagtcagcagccccctccattcagaccccgtctctgcagagtcccagtccctcgcagctgcaagcagctcagatccaggtgcagcacgtgcaagcagcccagcagatccaggctgcagaaatcccggaggagcacatcccacatcagcaaatccaggctcagctggtggctggccagtctcttgctggtggtcagcagatccaaatccagaccgtgggtgccctttccccaccaccatcccagcagggctcaccccgggaaggggagcggcgggttggcacggccagtgtcctccaaccagtgaagaagcgcaaagtggacatgcccatcactgtgtcctacgccatctcagggcagccggtggccaccgtgctggccattccacagggccagcagcagagttatgtgtctttgaggccagacttactgacagtagacagtgcccacctgtacagtgccactgggaccattactagccctacaggagaaacctggaccatccctgtttattctgcccagccccggggggaccctcagcagcagagcattacccacattgccattccccaggaagcctacaacgcagttcacgtcagtggctcacccacagccctggcagctgttaagctggaggatgacaaggagaagatggtgggcaccacatctgtagtgaaaaactcccatgaagaggtagtgcagacccttgcaaactctctctttccagcacagttcatgaatggcaacatccacattccagtggctgtgcaggctgtggcaggcacgtaccagaatacggctcaaactgtccatatatgggacccccaacagcagccgcagcagcaaactccccaggaacagacaccaccaccacagcagcagcagcagcaactccaagttacttgttcagctcaaactgtccaggttgctgaagttgaaccacagtcacagccacagccttccccagaacttctgcttccaaattctttgaagccagaagaagggcttgaagtatggaaaaactgcgcccagaccaagaatgctgaactagagaaggatgctcagaacagattggcacccattgggaggcgccaactgctgcgattccaggaagatctcatctcctctgctgtggcagagttgaattatgggctctgtctaatgacacgggaagctcgaaatggagaaggtgaaccctatgacccagatgtgctctactatattttcctgtgtattcaaaagtatctttttgaaaatggaagggtagatgacattttctccgatctttattatgttcggttcacggagtggctacatgaagttctgaaggatgttcagccccgggtcactccacttggctatgtcttgcccagccacgtgactgaggagatgctatgggagtgcaagcagcttggggctcactccccctccaccttggtgaccaccctcatgttctttaataccaaggacttcctattgaagacagtggaccagcacatgaagctggccttctccaangtcttgcgacagacaaagaagaacccctctaatcccaaggataaaagcacgagtatccggtacttgaaggcccttggaatacaccagactggccagaaagttacagatgacatgtatgcagaacagacggaaaatccagagaatccattgagatgtcccatcaagctctatgatttctacctcttcaaatgcccccagagtgtgaaaggccggaatgacaccttttacctgacacctgagccagtggtggcccccaacagcccaatctggtactcagtccagcctatcagcagagagcagatgggacaaatgctgacgcggatcctggtgataagagaaattcaggaggccatcgcagtggccaatgcaagcactatgcactgagatgccttggccatggcacaagagaaaccagccaggaaaaaccagacagactttcacactaaagaagaggcctccatttttttttttcttttttttattggtgtagttacgaagcctttcaggctgcttctgtttaaaatataaaagaaaactttgccccctttgcatcttcataaacctgctgcggcagactcctcagccgatggtggctctgggtttccttgagtgtcatatgtcctagaaagttgctggctgactcttttttgtctggggcctggggaaagggcttggactgtgaaaagaaatgtggcccctttccatcttcaagagagatggaattaatgatggatggaccctggagggaatctccccagcccgacttccactgggctgacagactttgctgaccacaggggaacgatgttcttttctttcttcatgatcagacataaacttagcatcttaatggaagaaaaatgaggggaacttcaattatgatttattaaagacaatttctattacaccctcctttatgacaagtgacattttagatgtaaaagtaaaaactttaccatgccttttttttttgttggcctaacattgaggccttaaaacctgaggctcctgtgcctgatggaattcttgtaacatacacttgtgtatcatataaagataccactctgtttctcttaaaaaaaaaaaaaaaaaaaaaaaaaaaaaaaaaa

SEQ ID NO: 222 - DNA, 1896 bp, Homo sapiens
  SITE (1718): n equals a,t,g, or c
  SITE (1832): n equals a,t,g, or c
  SITE (1859): n equals a,t,g, or c
  SITE (1871): n equals a,t,g, or c
  SITE (1887): n equals a,t,g, or c
aaactgtagtaaaaatgagaaaaggctagaagaacagaatgaggaaatgatgaagaaggttttagcacagtatgatgagaaagcccagagctttgaggaagtgaagaagaagaagatggagttcctgcatgagcagatggtccactttctgcagagcatggacactgccaaagacaccctggagaccatcgtgagagaagcagaggagcttgatgaggccgtcttcctgacttcgtttgaggaaatcaatgaaaggttgctttctgcaatggagagcactgcttctttagagaaaatgcctgctgcgttttcccttttcgaacattatgatgacagctcggcaagaagtgaccagatgttaaaacaagtggctgttccacagctcctagattagaacctcaggaaccaaattctgccaccagcacaacaattgcagtttactggagcatgaacaaggaagatgtcattgattcatttcaggtttactgcatggaggagccacaagatgatcaagaagtaaatgagttggtagaagaatacagactgacagtgaaagaaagctactgcatttttgaagatctggaacctgaccgatgctatcaagtgtgggtgatggctgtgaacttcactggatgtagcctgcccagtgaaagggccatctttaggacagcaccctccacccctgtgatccgcgctgaggactgtactgtgtgttggaacacagccactatccgatggcggcccaccaccccagaggccacggagacctacactctggagtactgcagacagcactctcctgagggagagggcctcagatctttctctggaatcaaaggactccagctgaaagttaacctccaacccaatgataactactttttctatgtgagggccatcaatgcatttgggacaagtgaacagagtgaagctgctctcatctccaccagaggaaccagatttctcttgttgagagaaacagctcatcctgctctacacatttcctcaagtgggacagtgatcagctttggtgagaggagacggctgacggaaatcccgtcagtgctgggtgaggagctgccttcctgtggccagcattactgggaaaccacagtcacagactgcccagcatatcgactcggcatctgctccagctcggctgtgcaggcaggtgccctaggacaaggggagacctcatggtacatgcactgctctgagccacagagatacacatttttctacagtggtattgtgagtgatgttcatgtgactgagcgtccagccagagtgggcatcctgctggactacaacaaccagagacttatcttcatcaacgcagagagcgagcagttgctcttcatcatcaggcacaggtttaatgagggtgtccaccctgcctttgccctggagaaacctggaaaatgtactttgcacctggggatagagcccccggattctgtaaggcacaagtgatccttggctttcagaatttgcaagaacagcgatttgaattttgggggggtctgctgttcattcctttaggtgctatacattattcaaaaagtctcccgcgcatttgcactaatgatggctgcatgcatagcaatcagcatgtgagcaaaatcgacaagaaaaccttgactttacagagcagtgtgtgagtaaacagaatgaaaacaacaacctccactctttagtttatataagtttgagttctntcctaaattaaaagatctacacttgagttgggaaccgaaagagaaaaatggacttccatctgttttactggtaaaggaaatcctctgatggacaggttcagaattgaaaggaangttgttgctgggtaaaaaactctctgnacaaaaaaaccnttgggaatgctttccnccaaaaatg

SEQ ID NO: 223 - DNA, 2678 bp, Homo sapiens
  SITE (2535): n equals a,t,g, or c
  SITE (2628): n equals a,t,g, or c
  SITE (2638): n equals a,t,g, or c
  SITE (2669): n equals a,t,g, or c
cggtctctcagagccgcacactccgcggagctcctgccacagccgtcgccttcgcggcggctctccagccccgcgcctcagcctcggcgccgcatcaccgcgtcccaggcctccttccctccctctgccactccccctccctttcccgctcttcttgcccacccggccggcagagagagcctggatacgaagcaggcgggcttcagagtgggttggaaaaatggaggtgccgcgcctggatcatgccctcaacagccccaccagcccctgtgaggaggtgatcaaaaacctcagcctggaggccattcagctgtgcgaccgggacgggaacaaatcacaagacagtggcatagcagagatggaagaacttcctgtaccacataacatcaaaataagcaatataacgtgtgactcattcaagatttcatgggaaatggattcaaaatcaaaggatcgcattacacactattttattgacctcaacaagaaagagaacaagaactccaataaatttaaacacaaggatgttcccacaaaattggtggcaaaagctgttcccttgcctatgactgtccgtggacactggtttttaagcccaagaactgaatatacagtagcagtgcagactgcctcaaaacaagttgatggtgattatgttgtgtctgaatggagtgaaattatagaattctgcaccgcagactattcaaaagttcatctaacacaattgttggagaaggctgaagtgattgcaggacgcatgcttaagttttctgttttttatcgtaatcagcacaaagaatattttgactatgttcgagaacatcatgggaatgctatgcagccatctgtcaaggataacagtggtagccatggctctcctatcagtggaaaattagaaggcatcttcttcagctgcagcactgaattcaatactggaaagccaccccaggattcaccttatggaagatacaggtttgagattgccgcagaaaaactttttaaccccaatactaacttatactttggggacttctactgtatgtacactgcttatcattatgtgattcttgttattgctcctgtgggatcaccaggagatgaattttgtaagcagcgccttcctcaactaaattctaaggataataaatttttgacctgtacagaagaagatggggtgctggtttaccaccatgcccaggatgtcattttagaagtcatttacactgaccctgtggatctttctctgggcaccgtggcagaaatcactggtcatcagctcatgagtttgtctactgcaaatgcaaagaaagatcccagctgcaaaacctgtaatatcagtgttggacgttaatgcccacttttcttattcttactcagccccttttcctcccttaggagcattggtcctctgttgtccatttttatcaccagatgttttccactgaagcatgcacatgccactgtcaccaaaacaaacaactaccactttccaaatttcattcagaaccattttagtgttttcctattccctacccctcccactactttcaatgatgaaataccctaagttaagttctccttttgacactttattgcctagatgctgcaatgtttttatgtttcctttatgccaaacataacaaaacagttatatagactgctttagcaaagtacacaataatggcttataaatggtgtttaaatatgcattcattttaatctactgaacaaatattgggataactccaaaccgcatgaaagggtgtaattgcagcatgagttaaatcttgaagcctagaattgtcagcacttccaacttcttgtttgacagtgttatttatgttatttatattagctaacaggaaacaactactgtgtttcaacataataaatataatagaaaaatattttatttgtattgttgtataaaatatttacaatcatatagaatatatagagttacattttaatagcaactgtgtacatgtcacgaaaccatttcccttatcaaagatgtaatttgtaaacctcaaatagttgtgtatctgtcctgttagaagtagatgacttcaattaaacaaatttatgaaggacattattctgattcataaaagttataaaatattaggtaaatacagagaaaacaataagcctctgaaataagtctgtttctgaaatagtcaatagtcttcccatccaaactataagagaatgtgaatttcttcaacatcatacttaaacattacagaaaatagaaatacaaacaaggttggtacatgagagaaaatgttgaccttttacttccttttacaaaaatgaaaataataaacatgttttcgtataaaataacacaaaatgatatacactgaagttgatgaagcaaataaatattctggcttctttttcaaggtatcagggcaaacaatttccaaacttttcattttgtacagaaggatgaataactacagctcatggggaaatgttttgactttacaaagtatagatgttgggaacattaaggaaaaatgtatattncccaatggaaaaaatagttattatccatcttataggtaaaccaaaaggattaggccattaatactttggggccactttgggtttttatacctnccgggccccntttcctttccccaattaccccttttttaaanttttttatt

SEQ ID NO: 224 - DNA, 376 bp, Homo sapiens
  SITE (174): n equals a,t,g, or c
  SITE (366): n equals a,t,g, or c
  SITE (370): n equals a,t,g, or c
tcgacccacgcgtccgcctgacgaaaaagagggttacgctgctcattttgagtatctgggccatcgccatctttatgggggctgtccccaccctgggctggaattgcctctgtgacatctctgcctgctcttccctggcccccatttatagcaggagttacctcattttctggnacagtgtccaaccttgtgggcctttttcatcatggttgtggtgtacctggcggatctacatgtatgtcaagaggaaaaccaatgttttgtgctccacatacgagtgggtccatcagccgccggaagacacccatgtaagctggatgtaagacagtggatggactgtattgaggggacctttgttcgtgtggntggnacccca

SEQ ID NO: 225 - DNA, 454 bp, Homo sapiens
  SITE (368): n equals a,t,g, or c
  SITE (398): n equals a,t,g, or c
  SITE (448): n equals a,t,g, or c
gatcacaaagaaaatctttaagtcccaccttaagtcaagtcggaattccacttcggtcaaaaagaaatctagccgcaacatattcagcatcgtgtttgtgttttttgtctgttttgtaccttaccatattgccagaatcccctacacaaagagtcagaccgaagctcattacagctgccagtcaaaagaaatcttgcggtatatgaaagaattcactctgctactatctgctgcaaatgtatgcttggaccctattatttatttctttctatgccagccgtttagggaaatcttatgtaagaaattgcacattccattaaaagctcagaatgacctagacatttccagaatcaaaagaggaaatacancacttgaaagcacagatactttggtgagtnctaccctcttccaaagaaagaccacgtgtgcatgttgtcatcttcaattncataac

SEQ ID NO: 226 - DNA, 2533 bp, Homo sapiens
gggtcgacccacgcgtccggttaagacaattgaacttgaaggaggtcttttggaagatcactttgaaactactgtaaaaatgagtacataccttgtagcctacatagtttgtgatttccactctctgagtggcttcacttcatcaggggtcaaggtgtccatctatgcatccccagacaaacggaatcaaacacattatgctttgcaggcatcactgaagctacttgatttttatgaaaagtactttgatatctactatccactctccaaactggatttaattgctattcctgactttgcacctggagccatggaaaattggggcctcattacatatagggagacgtcactgctttttgaccccaagacctcttctgcttccgataaactgtgggtcaccagagtcatagcccatgaactggcgcaccagtggtttggcaacctggtcacaatggaatggtggaatgatatttggcttaaggagggttttgcaaaatacatggaacttatcgctgttaatgctacatatccagagctgcaatttgatgactattttttgaatgtgtgttttgaagtaattacaaaagattcattgaattcatcccgccctatctccaaaccagcggaaaccccgactcaaatacaggaaatgtttgatgaagtttcctataacaagggagcttgtattttgaatatgctcaaggattttctgggtgaggagaaattccagaaaggaataattcagtacttaaagaagttcagctatagaaatgctaagaatgatgacttgtggagcagtctgtcaaatagttgtttagaaagtgattttacatctggtggagtttgtcattcggatcccaagatgacaagtaacatgctcgcctttctgggggaaaatgcagaggtcaaagagatgatgactacatggactctccagaaaggaatccccctgctggtggttaaacaagacgggtgttcactccgactgcaacaggagcgcttcctccagggggttttccaggaagaccctgaatggagggccctgcaggagaggtacctgtggcatatcccattgacctactccacgagttcttctaatgtgatccacagacacattctaaaatcaaagacagatactctggatctacctgaaaagaccagttgggtgaaatttaatgtggactcaaatggttactacatcgttcactatgagggtcatggatgggaccaactcattacacagctgaatcagaaccacacacttctcagacctaaggacagagtaggtctgattcatgatgtgtttcagctagttggtgcagggagactgaccctagacaaagctcttgacatgacttactacctccaacatgaaacaagcagccccgcacttctcgaaggtctgagttacttggaatcgttttaccacatgatggacagaaggaatatttcagatatctctgaaaacctcaagcgttaccttcttcagtattttaagccagtgattgacaggcaaagctggagtgacaagggctcagtctgggacaggatgctccgctcggctctcttgaagctggcctgtgacctgaaccatgctccttgcatccagaaagctgctgaactcttctcccagtggatggaatccagtggaaaattaaatataccaacagatgttttaaagattgtgtattctgtgggtgctcagacaacagcaggatggaattaccttttagagcaatatgaactgtcaatgtcaagtgctgaacaaaacaaaattctgtatgctttgtcaacgagcaagcatcaggaaaagttactgaagttaattgaactaggaatggaaggaaaggttatcaagacacagaacttggcagctctccttcatgcgattgccagacgtccaaaggggcagcaactagcatgggattttgtaagagaaaattggacccatctcctgaaaaaatttgacttgggctcatatgacataaggatgatcatctctggcacaacagctcacttttcttccaaggataagttgcaagaggtgaaactattttttgaatctcttgaggctcaaggatcacatctggatatttttcaaactgttctggaaacgataaccaaaaatataaaatggctggagaagaatcttccgactctgaggacttggctaatggttaatacttaaatggtcaatagaaaaagtaggctgggcgcggtgctcacgcctgtaatcccagcactttgggaggctgagaagggcggatcacgaggtcaggagatggagaccatcctggctaacacggtgagaccccgtctccgctaaaaatacaaaaaattagccgggcatggtggcaggtgcctgtagtcccagctactcggcaggctgcagcaggaaaatggcataaacccgggaggtggagcttgcagtgagccgagattgcaccactgcattccagcctgggtgactgagcgagactctgtctcaaaaaaaaaaaaaaaaaaaaaaaaaaaaaaagaaaaagaaaaaaaa

SEQ ID NO: 227 - DNA, 1371 bp, Homo sapiens
ccacgcgtccgctcccgcctaacgtcttcagcccagccaggctgcccttcttccctgcggagggagggcctgggcggtcgcgttggcgggagggaggttacctttcccagtctcgctctggccgcctgagccaggaggaagcagcggcgaggtctgcgggaggcatggcgggagctccggacgagcgccggcggggccccgcggcaggggagcagctgcagcagcaacacgtctcttgccaggtcttccccgagcgtctggcccaggggaatccccagcaagggttcttctccagcttcttcaccagcaaccagaagtgccagcttaggctcctgaagacgctggagacaaatccatatgtcaaacttctgcttgatgctatgaaacactcaggttgtgctgttaacaaagatagacacttttcttgcgaagactgtaatggaaatgtcagtggaggttttgatgcttcaacatctcagatagttttgtgccagaataatatccataatcaggcccatatgaacagagtggtcacacacgagcttattcatgcatttgatcattgtcgtgcccatgtcgactggttcaccaacatcagacatttggcgtgctcagaggttcgagctgctaaccttagtggagactgctcacttgtcaatgaaatattcaggttacattttggattaaaacaacaccaccagacttgtgtgcgagacagagccactctttctatcctggctgttaggaatatcagcaaagaagtagctaaaaaggctgttgatgaagtttttgaatcttgtttcaatgaccatgaaccttttggaaggatcccacataacaagacttatgcaagatatgctcacagagactttgaaaaccgtgatcggtattattcaaatatatgagcacaatgacatttttatattacagagcttccatcatcatgaagaaaaaaaaatttggttctcaagtgaacaaacatataaaatgtaaacaatccctacaatccagataaaacagagaagactgtgattctagcatattatcagaaaaagtaactatggcaaaaaatgaaactgctttaaactccaaggcagaaattgtatctttatagctaaccatttagtaaataaatacattacatttttgtattttagtcatttgtttttattacatgtgattattttaaaatttgattatgaaacctgtgaagtgtgctcttccatgatgttgataggtgaccactgttggtatttacattaaatgtaaagaaatgtgtaaaaaaaaaaaaaaaaaaaaaaaaaaaaaaaaaaaaaaaaaaaaaaaaaaaaaaaaaaaaaaaaaaaaaaaaaaaaaaaaaaaaaaaaaaaa

SEQ ID NO: 228 - DNA, 535 bp, Homo sapiens
  SITE (452): n equals a,t,g, or c
  SITE (499): n equals a,t,g, or c
caactatgagcgctggcacaagcagcggagagtcatagacctggccttcagccggagctccttggttagcttaatggaaacattcaacgagaaggctgagcagctggtggagattctagaagccaaggcagatgggcagaccccagtgtccatgcaggacatgctgacctacaccgccatggacatcctggccaaggcagcttttgggatggagaccagtatgctgctgggtgcccagaagcctctgtcccaggcagtgaaacttatgttggagggaatcactgcgtcccgcaacactctggcaaagttcctgccagggaagaggaagcagctccgggaggtccgggagagcattcgcttcctgcgccaggtgggcagggactgggtccagcgccgccgggaagccctgaagaggggcgaggaggttcctgccgacatcctcacacagattntgaaagctgaagagggagcccaggacgacgagggtctgctggacaanttcgtcaccttcttcattgctggtcacgagacctct

SEQ ID NO: 229 - DNA, 250 bp, Homo sapiens
ggtgatcgaggctgcggagacgcctttcacggkgggtgtcgaggtggacgtcttcgggaaactgggccgttcgcctcccaatgtccagttcaccttccaacagcccaagcctctcagtgtggagccgcagcagggaccgcaggcggscggcaccacactgaccatccacggcacccacctggacacgggctcccaggaggacgtgcgggtgaccctcaacggcgtcccgtgtaaagtgacgaatttgggg

SEQ ID NO: 230 - DNA, 4151 bp, Homo sapiens
  SITE (1): n equals a,t,g, or c
  SITE (1308): n equals a,t,g, or c
ntttcgaggactcaccaatctggttcggctaaacctttcggggaatttgttttcttcattatctcaaggaacttttgattatcttgcgtcattacggtctttggaattccagactgagtatcttttgtgtgactgtaacatactgtggatgcatcgctgggtaaaggagaagaacatcacggtacgggataccaggtgtgtttatcctaagtcactgcaggcccaaccagtcacaggcgtgaagcaggagctgttgacatgcgaccctccgcttgaattgccgtctttctacatgactccatctcatcgccaagttgtgtttgaaggagacagccttcctttccagtgcatggcttcatatattgatcaggacatgcaagtgttgtggtatcaggatgggagaatagttgaaaccgatgaatcgcaaggtatttttgttgaaaagaacatgattcacaactgctccttgattgcaagtgccctaaccatttctaatattcaggctggatctactggaaattggggctgtcatgtccagaccaaacgtgggaataatacgaggactgtggatattgkggkattagagagttctgcacagtactgtccgccagagagggtggtaaacaacaaaggtgacttcwkatggcccagaacattggcaggcattactgcatatctgcagtgtacgcggaacacccatggcagtgggatatatcccggaaacccacaggatgagagaaaagcttggcgcagatgtgatagaggtggcttttgggcagatgatgattattctcgctgtcagtatgcaaatgatgtcactagagttctttatatgtttaatcagatgcccctcaatcttaccaatgccgtggcaacagctcgacagttactggcttacactgtggaagcagccaacttttctgacaaaatggatgttatatttgtggcagaaatgattgaaaaatttggaagatttaccaaggaggaaaaatcaaaagagctaggtgacgtgatggttgacattgcaagtaacatcatgttggctgatgaacgtgtyctgtggctggcgcagagggaagctaaagcctgcagtaggattgtgcagtgtcttcagcgcattgctacctaccggctagccggtggagctcacgtttattcaacatattcacccaatattgctctggaagcttatgtcatcaagtctactggcttcacggggatgacctgtaccgtgttccagaaagtggcagcctctgatcgtacaggactttcggattatgggaggcgggatccagagggaaacctggnwtaagcagctgagctttaagtgcaatgtttcaaatacattttcgagtctggcactaaagaatactattgtggaggcttctattcagcttcctccttcccttttctcaccaaagcaaaaaagagamctcagaccractgatgactctctttacaagcttcaactcattgcattccgcaatggaaagctttttccagccactggcaaattcaacaaatttggctgatgatggaaaacgacgtactgtggttacccctgtgattctcaccaaaatagatggtgtgaatgtagatacccaccacatccctgttaatgtgacactgcgtcgaattgcacatggagcagatgctgttgcagcccggtgggatttcgatttgctgaacggacaaggaggctggaagtcagatggstgccatatactctattcagatgaaaatatcactacgattcagtgctactcccttagtaactatgcagttttaatggatttgacgggatctgaactatacacccaggcggccagcctcctgcatcctgtggtttatactaccgctatcattctcctcttatgtctcttagccgtcattgtcagttacatataccatcacagtttgattagaatcagcctcaagagctggcacatgcttgtgaacttgtgctttcatattttcctaacctgtgtggtctttgtgggaggaataacccagactaggaatgccagcatctgccaagcagttgggataattcttcactattccacccttgccacagtactatgggtaggagtgacagctcgaaatatctacaaacaagtcactaaaaaagctaaaagatgccaggatcctgatgaaccaccacctccaccaagaccaatgctcagattttacctgattggtggtggtatccccatcattgtttgcggcataactgcagcagcgaacattaagaattacggcagtcggccaaacgcaccctattgctggatggcatgggaaccctccttgggagccttctatgggccagccagcttcatcacttttgtaaactgcatgtactttctgagcatatttattcagttgaaaagacaccctgagcgcaaatatgagcytaaggagcccacggaggagcaacagagattggcagccaatgaaaatggcgaaataaatcatcaggattcaatgtctttgtctctgatttctacatcagccttggaaaatgagcacacttttcattctcagctcttgggggccagccttactttgctcttatatgttgcactgtggatgtttggggctttggctgtttctttgtattaccctttggacttggtttttagcttcgtttttggagccacaagtttaagcttcagtgcgttcttcrtggtccaccattgtgttaatagggaggatgttagacttgcgtggatcatgacttgctgcccaggacggagctcgtattcagtgcaagtcaacgtccagccccccaactctaatgggacgaatggagaggcacccaaatgccccaatagcagtgcggagtcttcatgcacaaacaaaagtgcttcaagcttcaaaaattcctcccagggctgcaaattaacaaacttgcaggcggctgcagctcagtgccatgccaattctttacctttgaactccacccctcagcttgataatagtctgacagaacattcaatggacaatgatattaaaatgcacgtggcgcctttagaagttcagtttcgaacaaatgtgcactcaagccgccaccataaaaacagaagtaaaggacaccgggcaagccgactcacagtcctgagagaatatgcctacgatgtcccaacgagcgtggaaggaagcgtgcagaacggcttacctaaaagccggctgggcaataacgaaggacactcgaggagccgaagagcttatttagcctacagagagagacagtacaacccaccccagcaagacagcagcgatgcttgtagcacacttcccaaaagtagcagaaattttgaaaagccagtttcaaccactagtaaaaaagatgcgttaaggaagccagctgtggttgaacttgaaaatcagcaaaaatcttatggcctcaacttggccattcagaatggaccaattaaaagcaatgggcaggagggacccttgctcggtaccgatagcactggcaatgttaggactggattatggaaacacgaaactactgtgtaacattgctgggcttcctaggcagaaattcatataaactgtgatactcacattccttgaagctatgagcatttaaaaactgtttacagccaccatagggattcaaaagaatttggaataaactttgaagttttggattttacttatttttatccccaaattgttgctattttttaggatctgaaacaaaatctttctaaaacattgttttagttgtcaaagcaccaacaggacattttgggatgtgaaatgtaatttcttggaatctgtaatttgtacttaatatttcaggcttgtatttaatataataaataggtgtttgttattgtgtcgatctgttatttttatattttacaatataagcattwagwtctattttaatgaaattagtggtttggggtattttaattagagttacacataagtcagttatatatatatattgcatggttaagtgtattgattttggcacataaatcaaagtgatttttgggttgctgtattttataagtctagttttaaatattaccaggttttaaaaggatctctcaggatgttttttgaaaatggaaatgcctaaaaaacttccaaaaaaaaaaaaaaaaaaaaactcgagggggggcccgtac

SEQ ID NO: 231 - DNA, 638 bp, Homo sapiens
ggcacgagcccatccccacccgggtctgcaaggtcagtgaccttcatgaaggccacttctatgagttccgtgcccgggctgccaactgggcaggtgttggcgagctgtcggcacccagcagcctgtttgagtgcaaagagtggacaatgccccagccaggccccccgtacgatgtacgggcatccgaggtgcgggctacatccctggtgctgcagtgggaacccccactgtatatgggggctgggcctgtcacaggctatcacgtcagtttccaggaggaaggctctgagcagtggaagccggtcaccccaggccccatctctggcacccacctgagggtttccgacttgcagccaggaaagagttacgtgttccaggtacaggccatgaattcagctggtctggggcaaccgtccatgcccactgatcccgtgctcctggaggacaagccaggtgcccatgagatcgaggttggtgtggatgaagagggctttatctatttggcttttgaagcccctgaagcccccgactcctcagagtttcagtggtccaaagactacaagggcccactggacccccagagggtcaagatcgaggataaagttaacaagtccaaggtcatcctgaaagaacccggc

SEQ ID NO: 232 - DNA, 789 bp, Homo sapiens
  SITE (3): n equals a,t,g, or c
  SITE (53): n equals a,t,g, or c
  SITE (538): n equals a,t,g, or c
  SITE (648): n equals a,t,g, or c
  SITE (673): n equals a,t,g, or c
  SITE (717): n equals a,t,g, or c
  SITE (738): n equals a,t,g, or c
  SITE (763): n equals a,t,g, or c
ggncctccaccgcggtggcggccgctctagaactagtggatcccccgggctgnaggaattcggcacgagataagaccatggcacttaagaacattaactaccttctcatcttctacctcagtttctcactgcttatctacataaaaaattccttttgcaataaaaacaacaccaggtgcctctcaaattcttgccaaaacaattctacatgcaaagatttttcaaaagacaatgattgttcttgttcagacacagccaataatttggacaaagactgtgacaacatgaaagacccttgcttctccaatccctgtcaaggaagtgccacttgtgtgaacaccccaggagaaaggagctttctgtgcaaatgtcctcctgggtacagtgggacaatctgtgaaactaccattggttcctgtggcaagaactcctgccaacatggaggtatttgccatcaggaccctatttatcctgtctgcatctgccctgctggatatgctggaagattctgtgagatagatcacgatgagtgtgcttncaagcccttgccaaaatggggcccgtgtgccaggatggaattgatggktactcctgcttctgggcccaggatatcaakgcagacactgcgacttggaagtggatgaatgngcttcaagatcctgcaaggaacgangctacatgcctcaatggaaataaggaagatatacttggatctgnccccacaattattctgggggnaaactggggaaattgggaaattggncgaaatggttgggccccaagccttgg

SEQ ID NO: 233 - DNA, 2555 bp, Homo sapiens
ggcacgagaaaaaacccaagatggataaaatattggaatcaagcatattcctgcaacccagtgtggcatttgggttcgaaccagcaatggaggtcattttgcttcgccaaattatcctgactcatatccaccaaacaaggagtgtatctacattttggaagctgctccacgtcaaagaatagagttgacctttgatgaacattattatatagaaccatcatttgagtgtcggtttgatcacttggaagttcgagatgggccatttggtttctctcctcttatagatcgttactgtggcgtgaaaagccctccattaattagatcaacagggagattcatgtggattaagtttagttctgatgaagagcttgaaggactgggatttcgagcaaaatattcatttattccaggtaaagaataagttatcttttaagtggttgggcatctcactctaactctgattttagaatcttaaggttagaaaagagattaatttggtcaagttaatcaaatcaagattttaaacaaattagcaaagtcaaagggaaattagtccatgaacaaataagaagttaatagaaattggacatagaaacgtatcacttgaattttgaagcatatcagagatggtgccacattttcttagatttttttctgtcttatagcacatgctcaggctaacatttaaaatacatttaaaaataaataattttaaaaataattcaacaaattgtcttgttttcagaattcccacaaaaattgttttgtatgatttttctcatttagctgttagaattaaccactcaactgaatgaatactctagaatatattgagcaatagaaagaatactgctctgcacttggatgtcaaagatctgggtttgaattctttctctgcctcctaatagctgtaagacgattaagcacagaattatgtttgagattggccattagtaaaatgggaatgcctgctgtgttagtttattgatgctgccataactaattacctcaaatttggccacttcagacagcagaaactgattttcttgccgttggggagaccagaagtccaaaattgagcagggcctcactccctctaggaacctgggggagaatccggtctttgctccttccagcctccagtgcatgccccagcattgctgggctgtggctgcatcacctcagtctcagcctccctcttcacagctctttctactcttttcaagatccttaacctaatggcatcttttgtcttgtaatatttactcttttaaaaaactatatgtgtgtgtgtgtgtgtatagatacatatataagtgcaccctactactcacaggttatggggaatccaatgtgtgtatattggggggctactgtaccatcagcctgctccaccgtgttacctgccccacagtaggtgagaacactctgagaactgtaaagccctgtccagtatggcgtgtacatatccctaatgcagaaacagatgtgcaagttattgttcctgtcttcaccaagcttacacactaacaagatgaaaaaataacagtaagacaactgcatgatctttttgcttttatttttcatgcaagaaatttaattggaaaaaattaaaacattgaaatgaaaagaaaatatccataatccttccaccctgtatataaaatcagtgtgaacaatttggtgtatatcccttccagtgtttttctatatctgtttcttttgtttgttacacaagattgggattatggtacacatataactttattatctgcttttttgcctgaaaaacagatgtttgcctgttagtacttatgtaggaaattttaagcttggcttcagtgtttatctgctctttttaaaaatttttttctatattctccatagccaaccaagtatttatttgcacaataccaaaaggatatttccaaaaagtaaacattgtctaatagactttattttttagaacagttttaggttcacagcaaaattacacaggaagtagagttaccataagcctcctgcctccctttccatcagcatcttgcacgagagtggtgcatttgttactaatgatgagccaacatccatgcatcattatcacccaaagcctgtagttgacattagggttcactcgcagtagggtgtgctctgtgagttttgacaaatgcatgatgacatgtatccgcccttacagaaccatacagaacagtcccactgctctaacagtgccccgtgctctgcctgttggtccctccctttccccaaaccactggcaatcgctgatctcttcagtatctccctagtcttgctatttccagaatgtcatgtaactggaattatacagtatggagccttttccagttagcaatatgcatataagtttcctccatgactttttgtggcttaatagctcattttttacaccaaataatacttcattgctagatgtaccatggttgtgtattcattctactgaaggacatgttgattgcttgcacattgtggggattatgaataaagctgctattcatgtgcaaaaaaaaaaaaaaaaa

SEQ ID NO: 234 - DNA, 1360 bp, Homo sapiens
tcgacccacgcgtccggatccccacccctgcccacccccgccctacgctggaccaaggacttcgtccccctggggaatggccccaccctctccctgagctccctcaccttcgactctgcgggcacctacgtctgtgaggcctccatgcccacggtccccctcctcagccgtacccagagcttcaagctgctggtccaagggccacctcaattaagtgcagaagagactcagccccagacagagggcggctggagggaaggagatgaagttaggctggtgtgctctgcccgcggttacccggagcccaaactcagctggagccaattgggtggcagcccagcagaaccggccctcactgggcagggctgggtgagcagctccctgaccctgaaggggaccagcgccctgagcagagaaggcgtctcctgcgaggcttccaacacccacgggaagaagcagcatgtcttccactttggctctgtggccccccagacttcccaggccggcgtggctgtcatggccgtggccgtcagcgtgggcctcctgcttctcgccgtcgctgccttctactgcatgagacgcaagggtcggcccggctgctgccggcgaggggaaaagggggctccgccacctggagacccacagctgagccactctgggtcagagcggcctgagcagacaggccttctcatgggaggtgcctctgggggagccaggcatggcagcgggggcttcggagatgaggtgggtgaggacccaggcaccttgtgggtggggggagcgccgggggatgtggggggcccaggctgacctctgcccctcctcccagtgctgagctcggacctcagagaggctccactggacctgacctcagagagtcagcatcagataaccagctctgcccagcctccgcctgcccccaccttccctcttccccctctggccctcccttcccttccttcctctgcaggcagggcagggacctacagcagccactgcttgccggagggagggagggtgggtaggaggggaccttcctccagggaatgtgactctcccaggccccagaatagctcctggacccaagcccagggcctggccgggacaagacaaggctccaaggctctgagggtcggctggcctgggcgattttttacctcctgcctgcatcgctggtccccccgccccacctgacgtcctgctgcatagtctgacactggatccccacccctgcccctccacccccaccccatcatctgtggacactggagtctggaataaaggctgtctgtcacgtcaaaaaaaaaaaaaaaaaaaaaaaaaaaaaaaaaaaaaaaaaaaaaaaaaaaaaaaaaaaaaa

SEQ ID NO: 235 - DNA, 1977 bp, Homo sapiens
ctgtgaattaaaatatggaggctttgttgtgagaagaactactgaattaactgttacagcccctctgactgataagccacccaagcttttgtatcctatggaaagtaaactgacaattcaggagacccagctgggtgactctgctaatctaacctgcagagctttctttgggtacagcggagatgtcagtcctttaatttactggatgaaaggagaaaaatttattgaagatctggatgaaaatcgagtttgggaaagtgacattagaattcttaaggagcatcttggggaacaggaagtttccatctcattaattgtggactctgtggaagaaggtgacttgggaaattactcctgttatgttgaaaatggaaatggacgtcgacacgccagcgttctccttcataaacgagagctaatgtacacagtggaacttgctggaggccttggtgctatactcttgctgcttgtatgtttggtgaccatctacaagtgttacaagatagaaatcatgctcttctacaggaatcattttggagctgaagagctcgatggagacaataaagattatgatgcatacttatcatacaccaaagtggatcctgaccagtggaatcaagagactggggaagaagaacgttttgcccttgaaatcctacctgatatgcttgaaaagcattatggatataagttgtttataccagatagagatttaatcccaactggaacatacattgaagatgtggcaagatgtgtagatcaaagcaagcggctgattattgtcatgaccccaaattacgtagttagaaggggctggagcatctttgagctggaaaccagacttcgaaatatgcttgtgactggagaaattaaagtgattctaattgaatgcagtgaactgagaggaattatgaactaccaggaggtggaggccctgaagcacaccatcaagctcctgacggtcattaaatggcatggaccaaaatgcaacaagttgaactccaagttctggaaacgtttacagtatgaaatgccttttaagaggatagaacccattacacatgagcaggctttagatgtcagtgagcaagggccttttggggagctgcagactgtctcggccatttccatggccgcggccacctccacagctctagccactgcccatccagatctccgttctacctttcacaacacgtaccattcacaaatgcgtcagaaacactactaccgaagctatgagtacgacgtacctcctaccggcaccctgcctcttacctccataggcaatcagcatacctactgtaacatccctatgacactcatcaacgggcagcggccacagacaaaatcgagcagggagcagaatccagatgaggcccacacaaacagtgccatcctgccgctgttgccaagggagaccagtatatccagtgtgatatggtgacagaaaagcaagggacatcccgtccctgggaggttgagtggaatctgcagtccagtgcctggaactaaatcctcgactgctgctgttaaaaaacatgcattagaatctctagaacacgaggaaaaacagggtcttgtacatatgttttttggaatttctttgtagcatcagtgtcctcctgttttaccatgtcttttaccattacattttttgactttgttttatatgtcgttggaatttgtaaatttacattttttttaaagaagagactgatgtgtagatagaaaaccctttttttgcttcattagtttagttttagaatgggtttttattttatttccttttttaaaattttactttgcttttaacatttccttggggtgcttgaacaaatctatccgatgggacaaggagcaccggattctttctcgggttctgcctagcatcaactgggccacgtcggccttcagagaacagtgcaacaaatgccagcattgccattcgggggaaaaaaaaaaaaaaaaaaaaaa

SEQ ID NO: 236 - DNA, 2043 bp, Homo sapiens
ccacgcgtccggcggaaggacagcttgctggccgtgcgctggttctttgcacactccttcgactcccaggaggccttgatggtgaagatgaccaagctccgggtggtgcagtactatgggaatttcagccgcagcgccaaacggcggaggctgcgcctgctggaggagcagcggggggcgctctacaggctctccgtcttgacactgcagccctccgatcaagggcattacgtctgcagagtccaggaaatcagcaggcacaggaacaagtggacggcctggtccaatggctcctcagccacggaaatgagagtcatttccctcaaagcttctgaagagtcatcctttgaaaacaaaagagacttgggcattttttgaagatctctatgtgtatgctgtcctcgtgtgctgcatggggatcctcagcattctgctcttcatgctggtcatcgtctggcagtctgtgtttaacaagcggaaatccagagtgagacattatttggtgaaatgccctcagaacagctcaggggagactgtcactagcgtgaccagcttggccccactacagcccaagaagggcaagaggcagaaggagaagcctgacattcctcccgcagtccctgccaaagctccgatagcccccacgttccataaaccgaagctgctgaaaccacagagaaaagtcacgctgccaaagattgctgaggaaaacttaacctatgccgagctggagctgatcaaaccccaccgggctgccaaaggcgcccccaccagcactgtctacgcccagatcctcttcgaggagaacaagctgtagtacagcgtccacctccaaggttctatttaatacctgccacccagtgatttatgaagccttggagacaaagcccttatgtctgtattttcactcatgccttctgagtggtggggagccccttttcagcagcattctgggtgcctttgaagaggtacaagcctgctctccccaaaagaatcagggccacagctcttgacagatctcccgggacaagatgcgcctgggtttgagccctgagcgtaaggattctgatcctgagagcagccaaggagattttctgctgagccaaaccccttcacatttttctcctctttccccaggttttctttaaaatcgtttttaaatcttaattttactctctactcttcctgtatccacgatacaagctcacagtatatagctagaggaaatgccattatggacccaactgtaagatggcacatatgttggttttccaaggatcagatggcattgccagggccacagccaactgctgattgccagcaccacctgagatggcatctcttgttttaaatagatgcactaaccctgaagattaaggccagaggggcagactgactagagaagtataaggtctgtctctgaatgccatggtgcccaccctatgagaccctgaggccgcaggacaagaagaacaccattctagagggcttccagccctttcacaaggtggacctgtactgatagagaaacacactctctaagaagtgcttactcacccttttccaaaggagcacaggtgttggccatcagaagacacactggagcgcatgggcctcttcactgtgtgccaagctcagtcacctctgattcagcccctgagggtgtctgctgccaggtgccctcagggtaggagagtgggaagtacacgccaagctggaaagtgtgttctgaagaccctcctcttgccaagtgccttgcccattgcaaccttgtgtgtgaattctaatgggtttgaatgggggtcagggtgcatggggaagttgctctgtggacctttgggacacaggaatcttggacttactggcaggggatccattctgaaagcaccatcctgtcaactgtgttattgaggacatttcttgatgtgagtatagtctgggtggctatttactgcccactatagaaattgtttgactatgtagtggaccatgtatatatgataaattatctattttaaacacaaaaaaaaaaaaaaaaaaaaa

SEQ ID NO: 237 - DNA, 2159 bp, Homo sapiens
ctggaggtcctgcagttgggcaggaactccatccggcagattgaggtgggggccttcaacggcctggccagcctcaacaccctggagctgttcgacaactggctgacagtcatccctagcggggcctttgaatacctgtccaagctgcgggagctctggcttcgcaacaaccccatcgaaagcatcccctcttacgccttcaaccgggtgccctccctcatgcgcctggacttgggggagctcaagaagctggagtatatctctgagggagcttttgaggggctgttcaacctcaagtatctgaacttgggcatgtgcaacattaaagacatgcccaatctcacccccctggtggggctggaggagctggagatgtcagggaaccacttccctgagatcaggcctggctccttccatggcctgagctccctcaagaagctctgggtcatgaactcacaggtcagcctgattgagcggaatgcttttgacgggctggcttcacttgtggaactcaacttggcccacaataacctctcttctttgccccatgacctctttaccccgctgaggtacctggtggagttgcatctacaccacaacccttggaactgtgattgtgacattctgtggctagcctggtggcttcgagagtatatacccaccaattccacctgctgtggccgctgtcatgctcccatgcacatgcgaggccgctacctcgtggaggtggaccaggcctccttccagtgctctgcccccttcatcatggacgcacctcgagacctcaacatttctgagggtcggatggcagaacttaagtgtcggactccccctatgtcctccgtgaagtggttgctgcccaatgggacagtgctcagccacgcctcccgccacccaaggatctctgtcctcaacgacggcaccttgatcttttcccacgtgctgctttcagacactggggtgtacacatgcatggtgaccaatgttgcaggcaactccaacgcctcggcctacctcaatgtgagcacggctgagcttaacacctccaactacagcttcttcaccacagtaacagtggagaccacggagatctcgcctgaggacacaacgcgaaagtacaagcctgttcctaccacgtccactggttaccagccggcatataccacctctaccacggtgctcattcagactacccgtgtgcccaagcaggtggcagtacccgcgacagacaccactgacaagatgcagaccagcctggatgaagtcatgaagaccaccaagatcatcattggctgctttgtggcagtgactctgctagctgccgccatgttgattgtcttctataaacttcgtaagcggcaccagcagcggagtacagtcacagccgcccggactgttgagataatccaggtggacgaagacatcccagcagcaacatccgcagcagcaacagcagctccgtccggtgtatcaggtgagggggcagtagtgctgcccacaattcatgaccatattaactacaacacctacaaaccagcacatggggcccactggacagaaaacagcctggggaactctctgcaccccacagtcaccactatctctgaaccttatataattcagacccataccaaggacaaggtacaggaaactcaaatatgactcccctcccccaaaaaacttataaaatgcaatagaatgcacacaaagacagcaacttttgtacagagtggggagagactttttcttgtatatgcttatatattaagtctatgggctggttaaaaaaaacagattatattaaaatttaaagacaaaaagtcaaaacaaaaatattttctaacttgtaagttctatttaaagggggtgggggggaatcttgggaacgttgtggggtacaagccacaagttaacttgctatgctgccagaagggatttctggtataaggttgaaattgctgagataaaataaactaaaacaacaaacatccttaaagaggtagggtgtgggctgctgagggggcaagagggatagactgaatctgtcattttttagaagatgcttcataggacacaggactatccatttctacagacatctttcttaagccgagagctgtctttgcagaattatcttattaaaaaaaaaaaaaaaaaaa

SEQ ID NO: 238 - DNA, 1926 bp, Homo sapiens
ccacgcgtccgcatcactactgccacctctacgagagcctggccgtccgcctggaggtcaccgacggccccccggccacccccgcctactgggacggcgagaaggaggtgctggcggtggcgcgcggcgcacccgcgcttctgacctgcgtgaaccgcgggcacgtgtggaccgaccggcacgtggaggaggctcaacaggtggtgcactgggaccggcagccgcccggggtcccgcacgaccgcgcggaccgcctgctggacctctacgcgtcgggcgagcgccgcgcctacgggcccctttttctgcgcgaccgcgtggctgtgggcgcggatgcctttgagcgcggtgacttctcactgcgtatcgagccgctggaggtcgccgacgagggcacctactcctgccacctgcaccaccattactgtggcctgcacgaacgccgcgtcttccacctgacggtcgccgaaccccacgcggagccgcccccccggggctctccgggcaacggctccagccacagcggcgccccaggcccagaccccacactggcgcgcggccacaacgtcatcaatgtcatcgtccccgagagccgagcccacttcttccagcagctgggctacgtgctggccacgctgctgctcttcatcctgctactggtcactgtcctcctggccgcccgcaggcgccgcggaggctacgaatactcggaccagaagtcgggaagtcaaaggggaaggatgttaacttggcggagttcgctgtggctgcaggggaccagatgctttacaggagtgaggacatccagctagattacaaaaacaacatcctgaaggagagggcggagctggcccacagccccctgcctgccaagtacatcgacctagacaaagggttccggaaggagaactgcaaatagggaggccctgggctcctggctgggccagcagctgcacctctcctgtctgtgctcctcggggcatctcctgatgctccggggctcaccccccttccagcggctggtcccgctttcctggaatttggcctgggcgtatgcagaggccgcctccacacccctcccccaggggcttggtggcagcatagcccccacccctgcggcctttgctcacgggtggccctgcccacccctggcacaaccaaaatcccactgatgcccatcatgccctcagacccttctgggctctgcccgctgggggcctgaagacattcctggaggacactcccatcagaacctggcagccccaaaactggggtcagcctcagggcaggagtcccactcctccagggctctgctcgtccggggctgggagatgttcctggaggaggacactcccatcagaacttggcagccttgaagttggggtcagcctcggcaggagtcccactcctcctggggtgctgcctgccaccaagagctcccccacctgtaccaccatgtgggactccaggcaccatctgttctccccagggacctgctgacttgaatgccagcccttgctcctctgtgttgctttgggccacctggggctgcaccccctgccctttctctgccccatccctaccctagccttgctctcagccaccttgatagtcactgggctccctgtgacttctgaccctgacacccctcccttggactctgcctgggctggagtctagggctggggctacatttggcttctgtactggctgaggacaggggagggagtgaagttggtttggggtggcctgtgttgccactctcagcaccccacatttgcatctgctggtggacctgccaccatcacaataaagtccccatctgatttttaaaaaaaaaaaaaaaaaaaaaaaaaaaaaaaaaaaaaaaaaaaaaaaaaaaaaaaaaaaaaaaaaaaaaaaaaaaaaaaaaaaaaaaaaaaaaaa

SEQ ID NO: 239 - DNA, 290 bp, Homo sapiens
  SITE (265): n equals a,t,g, or c
  SITE (274): n equals a,t,g, or c
gtctcggcacagcgcgtgctgcccttcgacgacaacatctgcctgcgggagccctgcgagaactacatgcgctgcgtgtcggtgctgcgcttcgactcctccgcgcccttcatcgcctcctcctccgtgctcttccggcccatccaccccgtcggagggctgcgctgccgctgcccgcccggcttcacgggtgactactgcgagaccgaggtggacctctgctactcgcggccctgtggcccccacgggcagctgccgcagccgngagggcggntacacctgcctctgtc

SEQ ID NO: 240 - DNA, 1289 bp, Homo sapiens
gcggccgccctttttttttttttttttttttttttttttaactgttctctagaaatatatttattcatgcaaacatgtctaagtcactctacgtatttttatacaacataagattgtttatgatcttatgaccatttttgtttatttttaatttttttgccagagagggctttcagtaaatgttttatttagaacattctttgaaaaatttgaagtgcaaagccacaaaaagcaatggatttaaatatataatgcgtagtagagttaggattatcacactagctctttttaaatctcactgctgttagtagtttcttttaattcttccatcactaattcctgttggggtttttcagcacttttcctataaagcaaggtttccccatgagggttttgaaatgtagattcctggacaagctgattagatgtgtttatgagcacatggcttttagcttttagggcataagcttccataggctttgctcttttttggcagagctggagctggaaagcttcttggaaaccacggcggaaattctcgttgaagaaaccataaatgatgggattgacactgctgttgccgaatgccagccagtgtgcaaaagggtagatgtagatgttgatgatctgcagttcatttggagaaaggtcagcgtagtctgagagcatcattagagtccacaggggcagccatgagagaataaaaagcagggccacaatcaggagcatcttaatgatcttctgcttcttcctggacaccacgtgccactgctcctggttcttcctgcctgtgtgaggaactgcagccctgaagagtgaaattccaatccttccatacatgatgacaatgagggagaggggagccaggtagatgttggcaaacagcacagtggtgtagatcttcctcatttcctgatttggccagtcttcccggcaccagtagactggactggttttattctgggagttgagtctcactcggtaatatttttcttcttgcacatgtaacattactgcagatggagacataatggtgatggctaggacccagatgatcataataatgacaaacgctgtcttgatagtgagctttggtttaaaagggtagaccacacactggaacctatctacagcaattgcaactaacgtaaagactgaagctgcgacagatattccctggaccaatccactgatcttgcacatcgtgtttccaaatggccatcctgctataatattgtccagcagtgttataggcatgcagaatatgccaactagtaaatcacttatgc

SEQ ID NO: 241 - DNA, 3311 bp, Homo sapiens
ccacgcgtccgctgagatgcaagtctgactttgccacatttatagcaaagtgatgctgagtcactaagcctctttttctccattgtgaaaggttcttccagtctagagctccatgattatgcacgggcagctggttcaaacacctatccattctgaagattagtgtttgggagaatgtatagcttagagactggtaatgtattttattacttccttcccaagatcttgctgctattcccgactttcagtctggtgctatggaaaactggggactgacaacatatagagaatctgctctgttgtttgatgcagaaaagtcttctgcatcaagtaagcttggcatcacaatgactgtggcccatgaactggcccaccaggtataagctcattcacacttttaataaagtataaactacatttatattgcttctatgggacatataaggctatttatataatttttactttgtctttttttaataggaaaaattgtttctccaaagcattcgtttttatgtcttataatgcatgttgaactttttttatttttaccttgattaaatattggtcctgtaaatatatgttaacattcataaacttatattggacatctaaaatatacttctttctgagtgtctttgtttatggcttatgttgtgcttttagtggtttgggaacctggtcactatggaatggtggaatgatctttggctaaatgaaggatttgccaaatttatggagtttgtgtctgtcagtgtgacccatcctgaactgaaagttggagattatttctttggcaaatgttttgacgcaatggaggtagatgctttaaattcctcacatcctgtgtctacacctgtggaaaatcctgctcagatccgggagatgtttgatgatgtttcttatgataagggagcttgtattctgaatatgctaagggagtatcttagtgctgacgcatttaaaagtggtattgtacagtatctccagaagcatagctataaaaatacaaaaaacgaggacctgtgggatagtatggcaagtatttgccctacagatggtgtaaaagggatggatggcttttgctctagaagtcaacattcatcttcatcctcacattggcatcaggaaggggtggatgtgaaaaccatgatgaacacttggacactgcagaagggttttcccctaataaccatcacagtgagggggaggaatgtacacatgaagcaagagcactacatgaagggctctgacggcgccccggacactgggtacctgtggcatgttccattgacattcatcaccagcaaatccgacatggtccatcgatttttgctaaaaacaaaaacagatgtgctcatcctcccagaagaggtggaatggatcaaatttaatgtgggcatgaatggctattacattgtgcattacgaggatgatggatgggactctttgactggccttttaaaaggaacacacacagcagtcagcagtaatgatcgggcgagtctcattaacaatgcatttcagctcgtcaggtaatacacgctgcacaaagtcgcggtttatttctgaaagcagctgttattgttcaaattcttgatttctaaagacaaaaatgattgattgataacaagaagttgaaaggtgttttcctttaagttcttctaacaacccaagattgcttttagtcttataattaacctcctgtctgtgactactaaggcacttgaaggaaggaatctgtatcttaatctttctcattaataattcagatcatactgaggcggaagtgtagataaccaggagatcaacatcctggcgaaactccttgccttgtccccgcagcatggtcccgcagcttcttctggccccgctataccggatcaggtttctcccaccactgggtctttataacagccttgaagtcttcttagaagactaagtgacacaggcccaagttgtttgcattacatttcttgggttaaagaagggatttttttttctttcctaaaccagatacctgaactttgcagcatctttatggaatatagctcataaaatgtagcccaaccaaatgatctctgagtgtgtgaagacagaattaacactaccctttttttttcctcccccatgacaatggtttttaaggaaatgctcccaaagcctaaaactcaaacttcttcaacatgtaggcagacctaaagtcctaagaggaagcatgcaggtgggaaggattatctctttctcctcatacccgtatccttctggcctaaattttgagtgccttctggttcttctcaccaccatactgggcctcctgaagtgagaaaaagcaatgggggagaaagttatgggttgcttacctagctgtttctttctgcctaaaaaattcccctctgtagaatatttctgcttgagccttagagggcttcttcttttttattttttaacttatataatatataccctaccactgaggtttttaacactaaccctctgtaatgaagggtttctaaggatatgcagtgtctttgaaatggagaagaaaatgtgtttcctccaggaactcatagttttgaccagatgatagtctgtttgaccaggcttcctaaagggtctttgatggaaatcccttgcttactctagaagttcaccactcaatccagtgtttcacagggatagatgctgatgtgcttcctttccggcttatccacgttagccctagacgttactgtttgagaaacttcctccctagtgtaaacatgccggatgttgtgttatatgtgatagaaaagagacttatatagtagttatctatctgtttgtttatttattttttggagatggagtctcactctgtcgcccaggctggagtgcagtggtgccatctcagctcaccgcctctgcctcccgggttcaagtgattctccggcctcagcctcccacataccaagtacctgccaccatgcctggctattttatgtatttttagtagagacggggtttcaccatgttggccaggctggtcttgaactcccgacctcaggtggattacttgagcccaggagtttgaggccagcctgggcaacatggcaaaaccctgtttccacaaaagtaaaaaatattagctgagtgtggaggtgcactcttgtagtcccagctacttgggaggctgagatgggaggatcacctgagcttgggaggttgaggctgcagtgaggtgtaattataccactgcaaatgcactccagtatgggtgacagagtgggaccttgtttccaaaaaaaaaaaaaaaaaaaaaaaaaaaaaaa

SEQ ID NO: 242 - DNA, 1948 bp, Homo sapiens
ggcacgagacaacgtccagccgttccttcaagcactcccgctctgctgccgtcacctcagagttccacttggtgcctagccgcagcatgaatgggcagccactgacttgtgtggtgtcccatcctggcctgctccaggaccaaaggatcacccacatcctccacgtgtccttccttgctgaggcctctgtgaggggccttgaagaccaaaatctgtggcacattggcagagaaggagctatgctcaagtgcctgagtgaagggcagccccctccctcatacaactggacacggctggatgggcctctgcccagtggggtacgagtggatggggacactttgggctttcccccactgaccactgagcacagcggcatctacgtctgccatgtcagcaatgagttctcctcaagggattctcaggtcactgtggatgttcttgacccccaggaagactctgggaagcaggtggacctagtgtcagcctcggtggtggtggtgggtgtgatcgccgcactcttgttctgccttctggtggtggtggtggtgctcatgtcccgataccatcggcgcaaggcccagcagatgacccagaaatatgaggaggagctgaccctgaccagggagaactccatccggaggctgcattcccatcacacggaccccaggagccagccggaggagagtgtagggctgagagccgagggccaccctgatagtctcaaggacaacagtagctgctctgtgatgagtgaagagcccgagggccgcagttactccacgctgaccacggtgagggagatagaaacacagactgaactgctgtctccaggctctgggcgggccgaggaggaggaagatcaggatgaaggcatcaaacaggccatgaaccattttgttcaggagaatgggaccctacgggccaagcccacgggcaatggcatctacatcaatgggcggggacacctggtctgacccaggcctgcctcccttccctaggcctggctccttctgttgacatgggagattttagctcatcttgggggcctccttaaacacccccatttcttgcggaagatgctccccatcccactgactgcttgacctttacctccaacccttctgttcatcgggagggctccaccaattgagtctctcccaccatgcatgcaggtcactgtgtgtgtgcatgtgtgcctgtgtgagtgttgactgactgtgtgtgtgtggaggggtgactgtccgtggaggggtgactgtgtccgtggtgtgtattatgctgtcatatcagagtcaagtgaactgtggtgtatgtgccacgggatttgagtggttgcgtgggcaacactgtcagggtttggcgtgtgtgtcatgtggctgtgtgtgacctctgcctgaaaaagcaggtattttctcagaccccagagcagtattaatgatgcagaggttggaggagagaggtggagactgtggctcagacccaggtgtgcgggcatagctggagctggaatctgcctccggtgtgagggaacctgtctcctaccacttcggagccatgggggcaagtgtgaagcagccagtccctgggtcagccagaggcttgaactgttacagaagccctctgccctctggtggcctctgggcctgctgcatgtacatattttctgtaaatatacatgcgccgggagcttcttgcaggaatactgctccgaatcacttttaatttttttcttttttttttcttgccctttccattagttgtattttttatttatttttatttttatttttttttagagatggagtctcactatgttgctcaggctggccttgaactcctgggctcaagcaatcctcctgcctcagcctccctagtagctgggactttaagtgtacaccactgtgcctgctttgaatcctttacgaagagaaaaaaaaaaaaaaaaaaa

SEQ ID NO: 243 - DNA, 643 bp, Homo sapiens
  SITE (590): n equals a,t,g, or c
  SITE (612): n equals a,t,g, or c
  SITE (631): n equals a,t,g, or c
  SITE (633): n equals a,t,g, or c
  SITE (635): n equals a,t,g, or c
gccgaataccaggatacaacggtttgaggttctcaagaacggtaccttagtgatacggaaggttcaagtacaagatcgaggccagtatatgtgcaccgccagcaacctgcacggcctggacaggatggtggtcttgctttcggtcaccgtgcagcaacctcaaatcctagcctcccactaccaggacgtcactgtctacctgggagacaccattgcaatggagtgtctggccaaagggaccccagccccccaaatttcctggatcttccctgacaggagggtgtggcaaactgtgtcccccgtggagggccgcatcaccctgcacgaaaaccggaccctttccatcaaggaggcgtccttctcagacagaggcgtctataagtgcgtggccagcaatgcagccggggcggacagcctggccatccgcctgcacgtggcggcactgcccccgttatccaccaggagaagctggagaacatctcgctgcccccggggctcagcattcacattcactgcactgccaaggctgcgcccctgcccagcgtgccgctgggtgctcggggacggtaccccagatccgcccctcgcantttcctccccgggaaacttggnttggttttccccaacgggncncntttacatt

SEQ ID NO: 244 - DNA, 1644 bp, Homo sapiens
ctgatgcaagggaagctggcttccaggtcaaggcctacactttcagtgaacccttccacctgattgtgtcctatgaactgtttccagcgccaattctcagagctgtaccctcagctgaaccccaagcaggaagccccatgaccctgagttgtcagacaaagttgcccctgcagaggtcagctgcccgcctcctcttctccttctacaaggatggaaggatagtgcaaagcagggggctctcctcagaattccagatccccacagcttcagaagatcactccgggtcatactggtgtgaggcagccactgaggacaaccaagtttggaaacagagcccccagctagagatcagagtgcagggtgcttccagctctgctgcacctcccacattgaatccagctcctcagaaatcagctgctccaggaactgctcctgaggaggcccctgggcctctgcctccgccgccaaccccatcttctgaggatccaggcttttcttctcctctggggatgccagatcctcatctgtatcaccagatgggccttcttctcaaacacatgcaggatgtgagagtcctcctcggtcacctgctcatggagttgagggaattatctggccaccggaagcctgggaccacaaaggctactgctgaatagaagtaaacagttcatccatgatctcacttaaccaccccaataaatctgattctttattttctcttcctgtcctgcacatatgcataagtacttttacaagttgtcccagtgttttgttagaataatgtagttaggtgagtgtaaataaatttatataaagtgagaattagagtttagctataattgtgtattctctcttaacacaacagaattctgctgtctagatcaggaatttctttctgttatatcgaccagaatgttgtgatttaaagagaactaatggaagtggattgaatacagcagtctcaactgggggcaattttgccccccagaggacattgggcaatgtttggagacattttggtcattatacttggggggttgggggatggtgggatgtgtgtgctactggcatccagtaaatagaagccaggggtgccgctaaacatcctataatgcacagggcagtaccccacaacgaaaaataatctggcccaaaatgtcagttgtactgagtttgagaaaccccagcctaatgaaaccctaggtgttgggctctggaatgggactttgtcccttctaattattatctctttccagcctcattcagctattcttactgacataccagtctttagctggtgctatggtctgttctttagttctagtttgtatcccctcaaaagccattatgttgaaatcctaatccccaaggtgatggcattaagaagtgggcctttgggaagtgattagatcaggagtgcagagccctcatgattaggattagtgcccttatttaaaaaggccccagagagctaactcacccttccaccatatgaggacgtggcaagaagatgacatgtatgagaaccaaaaaacagctgtcgccaaacaccgactctgtcgttgccttgatcttgaacttccagcctccagaactatgagaaataaaattctgttgtttgtaagctaaaaaaaaaaaaaaaaa

SEQ ID NO: 245 - DNA, 1666 bp, Homo sapiens
ggacccgccaggcagccaaggagaaagcagatgccatctatgatatgattggtttcccagactttatcctggagcccaaagagctggatgatgtttatgacgggtacgaaatttctgaagattctttcttccaaaacatgttgaatttgtacaacttctctgccaaggttatggctgaccagctccgcaagcctcccagccgagaccagtggagcatgaccccccagacagtgaatgcctactaccttccaactaagaatgagatcgtcttccccgctggcatcctgcaggcccccttctatgcccgcaaccaccccaaggccctgaacttcggtggcatcggtgtggtcatgggccatgagttgacgcatgcctttgatgaccaagggcgcgagtatgacaaagaagggaacctgcggccctggtggcagaatgagtccctggcagccttccggaaccacacggcctgcatggaggaacagtacaatcaataccaggtcaatggggagaggctcaacggccgccagacgctgggggagaacattgctgacaacggggggctgaaggctgcctacaatgcttacaaagcatggctgagaaagcatggggaggagcagcaactgccagccgtggggctcaccaaccaccagctcttcttcgtgggatttgcccaggtgtggtgctcggtccgcacaccagagagctctcacgaggggctggtgaccgacccccacagccctgcccgcttccgcgtgctgggcactctctccaactcccgtgacttcctgcggcacttcggctgccctgtcggctcccccatgaacccagggcagctgtgtgaggtgtggtagacctggatcaggggagaaatgcccagctgtcaccagacctggggcagctctcctgacaaagctgtttgctcttgggttgggaggaagcaaatgcaagctgggctgggtctagtccctcccccttcactggtwcatgagtacagaccctcctcaatcaccacattgtgcctctgctttgggggtgcccctgcctccagcagagcccccaccattcactgtgacatctttccgtgtcaccctgcctggaagaggtctgggtggggaggccagttcccataggaaggagtctgcctcttctgtccccaggctcactcagcctggcggccatggggcctgccgtgcctgccccactgtgacccacaggcctgggtggtgtacctcctggacttctccccaggctcactcagtgcgcacttaggggtggactcagctctgtctggctcaccctcacgggctacccccacctcaccctgtgctccttgtgccactgctcccagtgctgctgctgaccttcactgacagctcctagtggaagcccaagggcctctgaaagcctcctgctgcccactgtttccctgggctgagaggggaagtgcatatgtgtagcgggtactggttcctgtgtyttagggcacaagccttagcaaatgattgattctccctggacaaagcaggaaagcagatagagcagggaaaaggaagaacagagtttatttttacagaaaaragggtgggagggtgtggtyttggcccttataggaccctgtgccaataaacagacatgcatccgtsaaaaaaaaaaaaaaaaaaaaaaa

SEQ ID NO: 246 - DNA, 1363 bp, Homo sapiens
ttttttttttcgtttatgcaggagtttttattctttaaatcttccagtgttaaagcaacaagaaaacatttagaatgtcctttggtggaatcttattacacttgttatatatgtaaactgatattctttgatgccagcacgttcgttgcccttacagagaaatctctgcacagtgaaacaaaacagaacgaaagaggacaaaataaaatgtcagtctttgctgattcgaattagatacattaacagattgtctggtaacacaaattggcaataatacaaaaaatctacatattacagtagttcaagaaaaataacttcatttgaatacaaaaggatagatacactttcttttttcctatagccactcttgtatagtgggtgtgtgctcgcactggactcagtgctgctaagatatacaggggtatgactggcttgcgcttttagagggggctgttacacatgtgcatcactaacatcagacaaagaaatctttcaaccaacaagggttacagagcaacgttcactaaagcacaggttggaagggattcagggacggaagcaggccaatatggcagcttgtaacagatttccttatgcccacaatgcacctgacagcaaagaatgctatttggttggtccacacactgggcggagtcgtactagggcgcaccacgctagagtagccaatgtttttaggtcggttgatttgtttgttttttgtctttcctgtttggggggctgtcgcagcctttccaatccacaatatgctctgcagctggcaatgtgatttgcagtgataatatcaacagctgccaactcctctggagtcagaaattaacagtcttgactcggatgtgctgtccacgggtgataaatatggcttagttcagttaggccttcttagtttgtacactgtctgagtgggggtgtctgtatgtgtgtgtttcctatgttagtagcaaatgtttgggttgtgtctgcttccccacggcacaggcccgtccggtgtggctggaggtgacacctagaacaccagggggctgcggttcccagcagcgtggtcagcagcagcagcgctggggagccgtgcgggggcgcgccctggccagagtcggagccgcagctgccagcctcctcgcaccgcagcttctcgcagaggatgcccgtgtatgcggccgggcacaggcagcgcacgttgttgtggcacgtccctccgttctggcagtgcaggagctcgttgtcgcagacattcgtaccaatactggaaatactggggatacaggtatttgcagtgcctttggggatggggagataggagcctggactccaaggtcggccctgataattcttcttgcatttcccc

SEQ ID NO: 247 - DNA, 1758 bp, Homo sapiens
ccacgcgtccggcctttgctgctcctctctctgcacggtgttgcagcatccctggaagtgtcagagagccctgggagtatccaggtggcccggggtcagacagcagtcctgccctgcactttcactaccagcgctgccctcattaacctcaatgtcatttggatggtcactcctctctccaatgccaaccaacctgaacaggtcatcctgtatcagggtggacagatgtttgatggtgccccccggttccacggtagggtaggatttacaggcaccatgccagctaccaatgtctctatcttcattaataacactcagttatcagacactggcacctaccagtgcctggtcaacaaccttccagacatagggggcaggaacattggggtcaccggtctcacagtgttagttcccccttctgccccacactgccaaatccaaggatcccaggatattggcagcgatgtcatcctgctctgtagctcagaggaaggcattcctcgaccaacttacctttgggagaagttagacaataccctcaaactacctccaacagctactcaggaccaggtccagggaacagtcaccatccggaacatcagtgccctgtcttcaggtttgtaccagtgcgtggcttctaatgctattggaaccagcacctgtcttctggatctccaggttatttcaccccagcccaggaacattggactaatagctggagccattggcactggtgcagttattatcattttttgcattgcactaattttaggggcattcttttactggagaagcaaaaataaagaggaggaagaagaagaaattcctaatgaaataagagaggatgatcttccacccaagtgttcttctgccaaagcatttcacactgagatttcctcctcggacaacaacacactaacctcttccaatgcctacaacagtcgatactggagcaacaatccaaaagttcatagaaacacagattcagtcagccacttcagtgacttgggccaatctttctctttccactcaggcaatgccaacataccatccatttatgctaatgggacccatctggtcccgggtcaacataagactctggtagtgacagccaacagagggtcatcaccacaggtgatgtccaggagcaatggctcagtcagtaggaagcctcggcctccacacactcattcctacaccatcagccacgcaacactggaacgaattggtgcagtacctgtcatggtaccagcccagagtcgggccgggtccttggtataggacatgaggaaatgttgtgttcagaaatgaataaatggaatgccctcatacaagggggagggtggggtggggagtgctgggaaaagaaacacttccttataattatattagtaaaatgcacaaagaagaaggcagtgctgttacttggccactaagatgtgtaaaatggactgaaatgctccatcatgaagacttgcttccccaccaaagatgtcctgggattctgctggatctcaaagatgtgccaagccaaggaaaaagatacaagagcagaatagtacttaaaatccaaactgccgcccagatgggcttgttcttcatgcctaacttaataatttttaagagattaaagtgccagatggagtttaaaaaaaaaaaaaaaaaaaaaaaaaaaaaaaaaaaaaaaaaaaaaaaaaaaaaaaaaaaaaaaaaaaaaaaaaaaaaaaaaaaaaaaaaaaaaaaaaaaaaaaaaaaaaa

SEQ ID NO: 248 - DNA, 1962 bp, Homo sapiens
  SITE (1323): n equals a,t,g, or c
gcgagattccgggattggaatcaaaatgctaatttaaaaggtcaagtgaagctgctcctcacgttttggcgtgcctgcgctctctgcaggcagaagcgaacaaagacccagcaagagaaggcagaggctaagacccatcccgtatctgctctcctgaaataattctggagtcatgcctgaaatgccagaggacatggagcaggaggaagttaacatccctaataggagggttctggttactggtgccactgggcttcttggcagagctgtacacaaagaatttcagcagaataattggcatgcagttggctgtggtttcagaagagcaagaccaaaatttgaacaggttaatctgttggattctaatgcagttcatcacatcattcatgattttcagccccatgttatagtacattgtgcagcagagagaagaccagatgttgtagaaaatcagccagatgctgcctctcaacttaatgtggatgcttctgggaatttagcaaaggaagcagctgctgttggagcatttctcatctacattagctcagattatgtatttgatggaacaaatccaccttacagagaggaagacataccagctcccctaaatttgtatggcaaaacaaaattagatggagaaaaggctgtcctggagaacaatctaggagctgctgttttgaggattcctattctgtatggggaagttgaaaagctcgaagaaagtgctgtgactgttatgtttgataaagtgcagttcagcaacaagtcagcaaacatggatcactggcagcagaggttccccacacatgtcaaagatgtggccactgtgtgccggcagctagcagagaagagaatgctggatccatcaattaagggaacctttcactggtctggcaatgaacagatgactaagtatgaaatggcatgtgcaattgcagatgccttcaacctccccagcagtcacttaagacctattactgacagccctgtcctaggagcacaacgtccgagaaatgctcagcttgactgctccaaattggagaccttgggcattggccaacgaacaccatttcgaattggaatcaaagaatcactttggcctttcctcattgacaagagatggagacaaacggtctttcattagtttatttgtgttgggttcttttttttttttaaatgaaaagtatagtatgtggcactttttaaagaacaaaggaaatagttttgtatgagtactttaattgtgactcttaggatctttcaggtaaatgatgctcttgcactagtgaaattgtctaaagaaactaaagggcagtcatgccntgtttgcagtaatttttctttttatcattttgtttgtcctggctaaacttggagtttgagtatagtaaattatgatccttaaatatttgagagtcaggatgaagcagatctgctgtagacttttcagatgaaattgttcattctcgtaacctccatattttcaggatttttgaagctgttgaccttttcatgttgattattttaaattgtgtgaaatagtataaaaatcattggtgttcattatttgctttgcctgagctcagatcaaaatgtttgaagaaaggaactttatttttgcaagttacgtacagtttttatgcttgagatatttcaacatgttatgtatattggaacttctacagcttgatgcctcctgcttttatagcagtttatggggagcacttgaaagagcgtgtgtacatgtattttttttctaggcaaacattgaatgcaaacgtgtatttttttaatataaatatataactgtccttttcatcccatgttgccgctaagtgatatttcatatgtgtggttatactcataataatgggccttgtaagtcttttcaccattcatgaataataataaatatgtactgctggcatgtaaaaaaaaaaaaaaaaaaaaaaaaaaaaaaaa

SEQ ID NO: 249 - DNA, 1640 bp, Homo sapiens
gagccggtttcttgaagcagctggaagtcctggatagttcccacctgaaagtctgtttgcaaaggcaatgcgcactcaggcaccagagggcagaggggctcaagttccagggttttaaggtgcttggaactcccaggagcctggcaaaccttcatccagaacctcttcctcaagcaagacaaaaagctgctaagcactgctccctccgtctctgtgaagagaccagcttctaacagacggtgccgggctgaccccccatcatgccaggctggctcaccctccccacactctgccgcttccttctttgggccttcaccatcttccacaaagcccaaggagacccagcatcccacccgggcccccactacctcctgccccccatccacgaggtcattcactctcatcgtggggccacggccacgctgccctgcgtcctgggcaccacgcctcccagctacaaggtgcgctggagcaaggtggagcctggggagctccgggaaacgctgatcctcatcaccaacggactgcacgcccgggggtatgggcccctgggagggcgcgccaggatgcggagggggcatcgactagacgcctccctggtcatcgcgggcgtgcgcctggaggacgagggccggtaccgctgcgagctcatcaacggcatcgaggacgagagcgtggcgctgaccttgagcttggagggtgtggtgtttccgtaccaacccagccggggccggtaccagttcaattactacgaggcgaagcaggcgtgcgaggagcaggacggacgcctggccacctactcccagctctaccaggcttggaccgagggtctggactggtgtaacgcgggctggctgctcgagggctccgtgcgctaccctgtgctcaccgcacgcgccccgtgcggcggccgaggccggcccgggatccgcagctacggaccccgcgaccggatgcgcgaccgctacgacgccttctgcttcacctccgcgctggcggccaagtgttcttcgtgcccggcggctgacgctgtctgaagcccacgcggcgtgccggcgacgcggcgccgtggtggccaaggttgggcacctctacgccgcctggaagttttcggggctagaccagtgcgacggcggctggctggctgacggcagtgtgcgcttcccaatcaccacgccgaggccgcgctgcggggggctcccggatcccggagtgcgcagtttcggcttccccaggccccaacaggcagcctatgggacctactgctacgccgagaattaggcgcccaccgtgtcccctccagcgcgcgcgaagaagcttgggagtcgtggcgggggtctctcgccacccctttccggagagcctcccctccctccagacccggagcggcctctccagacctgccttcccagccgggggctgcgggcctcggaccccggctggcccggcggcggggaggggaggcgggggcgcctccggcggcgagatgcagaggtgaccctcggacccgctgccgttcgcgaaccctagcagaggactcagccaccgccgaggggagggtgaggcggccgggggcattaactgacctctgagtacagcaataaaataacctggggatctttaaaaaaaaaaaaaaaaaa

SEQ ID NO: 250 - DNA, 2140 bp, Homo sapiens
  SITE (1): n equals a,t,g, or c
  SITE (23): n equals a,t,g, or c
  SITE (37): n equals a,t,g, or c
  SITE (128): n equals a,t,g, or c
  SITE (145): n equals a,t,g, or c
  SITE (188): n equals a,t,g, or c
  SITE (2069): n equals a,t,g, or c
  SITE (2103): n equals a,t,g, or c
  SITE (2105): n equals a,t,g, or c
  SITE (2126): n equals a,t,g, or c
nccgttcaagggcggtcccattngccattcaggttgncaatgttggaaaggcgatcggtcgggccttttcgctattacgccagctggcgaaagggggatgtgctgcaaggcgattaagttgggtaacncagggttttcccagtcncgacgttgtaaaacgacggccagtgaattgaatttaggtgacnctatagaagagctatgacgtcgcatgcacgcgtacgtaagcttggatcctctagagcggccgcccttttttttttttttttttttttttttttttttttttttttttttttttttttcacgtttcatttttattgtgctgggggtcaggcagcagcccccactgaggccccacccagcctccgggctgcctggcctgtgccatgggtcccaggctccagcagggagctcgtaccttccctcagctgagggcccacctggccttgggatgccgttggggtagccagggtgggggtagccaggggtggattcacagagaagatcccagcccatcccatgccagggtctggggagcctcccgaggaaggggaggaggaagaggaggaaggccctgcctggccttccgctcagtcaccccgaggtggcttctggacccccagcatgttgggcaggggcatgggggctgcagggcggcgtgaggggctcagtccagcctggggcgctgggcagtcacgagtctttcttgcaggagcaggaccccagctgctcctccaggaaggaaatctgctcgctcagggagtcgatgcggccgagctgctggaaggagtgcaccaggaggctgccggggtccgggagcccatgctccagtgcctgcgaggccaggctgtgcagtggggccagcaccagctgcagcttctcctccagcaggtccaccctggactgcagcctctgcacttcttccttcattgcactgtccactcctgtcgggttgggggccaccctggggggccctcccttgggcacacagagtgtaccgtctgcagacaggctgtgcccctcccaacactggcaccagtaactgccggcggtgttgacgcagcgctggggacagccgcccctcctagcactgcattcatccacatctgactggcaagtgtcaccccgccatcctgcagggcagcggcagcggccaggctggacacagctccctccgttccggcatggcggctggcatattgcggtaggtgctgcaggcccggtgcccgtcgcaggtggtgaggaagggctggtacacacgctgcacgaacgactcggagacagggtccccgtgagcccggacagcacacaccctacggctggcggaggagaatcagtcatcccccggacaggggcaggagctgctcctccgggtggtgggggccacctgtgcctccccggtcctgggggctgctgatgctgctggagcccaggcgtggccatggtggccgctgctgtgtcctgggactggagatggaccctagcccttgctggggcctcaggcccactggccgcctggaggcacctcctgaggcccacctgcctggccggacgcgtgggtcgacccgggaattccggaccggtacctgcaggcgtaccagctttccctatagtgagtcgtattagagcttggcgtaatcatggtcatagctgtttcctgtgtgaaattgttatccgctcacaattccacacaacatacgagccggaagcataaagtgtaaagcctggggtgcctaatgagtgagctaactcacattaattgcgttgcgctcactgcccgctttccagtcgggaaacctgtcgtgccagctgcattaatgaatcggccaacgcgcggggagaggcggtttgcgtattgggcgccagggtggtttttcttttcaccagtgagacgggcaacagctgattgcccttcaccgctggccctgagagagttgcagcaagcggtccacgctggtttgccccarcaggcgaaaatcctgtttgatggtggtaacggcgggatataacatgaactggcttcggkatcgcgkattccactaccgagatatccgaccaaccgcaancccggactcggtaatggcgccaattgggcccaangncaattgatcgttgcaaccaanatcgcaatgggaac

SEQ ID NO: 251 - DNA, 1701 bp, Homo sapiens
ggccttacggcacagtagagagcttccagggctggctggcgtgggatacccgtaccacagaaatgcagggaccattgcttcttccaggcctctgctttctgctgagcctctttggagctgtgactcagaaaaccaaaacttcctgtgcctcctcctggcggccctcacttttctcctgtgtaaagccatccagaacaccagcacctcactgcatctgcagctctcgctctgcctcttcctggcccacctcctcttcctcgtggggattgatcgaactgaacccaaggtgctgtgctccatcatcgccggtgctttgcactatctctacctggccgccttcacctggatgctgctggagggtgtgcacctcttcctcactgcacggaacctgacagtggtcaactactcaagcatcaatagactcatgaagtggatcatgttcccagtcggctatggcgttcccgctgtgactgtggccatttctgcagcctcctggcctcacctttatggaactgctgatcgatgctggctccacctggaccagggattcatgtggagtttccttggcccagtctgtgccattttctctgcgaatttagtattgtttatcttggtcttttggattttgaaaagaaaactttcctccctcaatagtgaagtgtcaaccatccagaacacaaggatgctggctttcaaagcaacagctcagctcttcatcctgggctgcacatggtgtctgggcttgctacaggtgggtccagctgcccaggtcatggcctacctcttcaccatcatcaacagcctccaaggcttcttcatcttcttggtctactgcctcctcagccagcaggttcagaaacaatatcaaaagtggtttagagagatcgtaaaatcaaaatctgagtctgagacatacacactttccagcaagatgggtcctgactcaaaacccagtgagggggatgtttttccaggacaagtgaagagaaaatattaaaactagaatattcaactccatatggaaaatcatatccatggatctctttggcattatgaagaatgaagctaaggaaaagggaattcattaaacatatcatccttggagaggaagtaatcaacctttacttcccaagctgtttgttctccacaataggctctcaacaaatgtgtgggaagggagggatgtgtgcatcctggaagagaagcaggctgtccctgaaggttctcaaaggttcagtgggaagaactcacgtgctcagcaaagctattgatgatgaccaagtgagagtaattctcctggcagaacatccgggcctcatcccatgacttggtgcttggggagaagtagtaacacttgccctcaaagggcagccagccttcaggacagagatggggtcttgctatgttgccccggctggtctcaaactcctgtcctcaagcgatcctcccacctcggcctcccaaagtatcaagactacagatgcacaccactgcagctggcccaaacctccactttaacaaccacttatcagtctcctgttggaccctgtaccatgccttgggtttgtgatccaagtctaaataaaacctgggctttgggtagaaaggtgaggagattgggagcccacagtccactcccagtttctcaagcaccagcttttgtaactcagggactttgcacctaaaaaaaaaaaaaaaaaa

SEQ ID NO: 252 - DNA, 454 bp, Homo sapiens
  SITE (412): n equals a,t,g, or c
  SITE (450): n equals a,t,g, or c
  SITE (451): n equals a,t,g, or c
gccctactctgtcacctccgctggaaggagtggaacccagacttgctggtctgatccatgcagatggccaggctgctaggcctctgtgcctgggcacggaaktcggtgcggatggccagctccrggatgacccgccgggacccgctcrcaaataaggtggccctggtaacggcctccaccgacgggatcggcttcgccatcgcccggcgtttggcccaggacrgggcccaygtggtcgtcagcagccggaagcagcagaatgtggaccaggcggtggccacgctgcagggggaggggctgagcgtgacgggcacgtgtgccatgtggggaaggcggaggaccgggagcggctggtggccayggtgarctgcagggaaatgggcacagagccargaagtggaaaaggagccanctgamctkcttcctgctttcctaagacagcaacacatnngaa

SEQ ID NO: 253 - DNA, 1292 bp, Homo sapiens
gagccctacaggcaacttgaacggagagcgctttgatcactcaccagcccgggaaggcaagccccagtcaggcggaaggtagctggctgcggggcggggcgactggcgggcggcgggaggcgccaaccgscacagacgactcccagctggccgagggcgggaagggggcaggcagggaagcggcccgccttcgtcctgccccttcgcctaytctgkcacctcccgttggaaggagtggaacccagacttgctggtctgatccatgcacaaggcsrggctgctaggcctctgtgcccgggcttggaattcggtgcggatggccagctccgggatgacccgccgggacccgctcgcaaataaggtggccctggtaacggcctccaccgacgggatcggcttcgccatcgcccggcgtttggcccaggacggggcccaygtggtcgtcagcagccggaagcagcagaatgtggaccaggcggtggccacgctgcagggggaggggctgagcgtgacgggcaccgtgtgccatgtggggaaggcggaggaccgggagcggctggtggccayggctgtgaagcttcatggaggtatcgatatcctagtctccaatgctgctgtcaaccctttctttggaagcmtaatggatgtcacygaggaggtgtgggacaagctctggatggacaaggaaaaagaggaaagcatgaaagaaaccctgcggataagaaggttaggcgagccagaggattgtgctggcatcgtgtctttcctgtgctctgaagatgccagctacatcactggggaaacagtggtggtgggtggaggaaccccgtcccgcctctgaggaccgggagacagcccacaggccagagttgggctctagctcctggtgctgttcctgcattcacccactggcctttcccacctctgctcaccttactgttcacctcatcaaatcagttctgccctgtgaaaagatccagccttccctgccgtcaaggtggcgtcttactcgggattcctgctgttgttgtggccttgggtaaaggcctcccctgagaacacaggacaggcctgctgacaaggctgagtctaccttggcaaagaccaagatattttttcctgggccactggggaatctgaggggtgatgggagagaaggaacctggagtggaaggagcagagttgcaaattaacaacttgcaaatgaggtgcaaataaaatgcagatgattgcgcggctttgaaaaaaaaaaaaaaaaaaaaaaacctcggggggggccccgttcccmattt

SEQ ID NO: 254 - DNA, 1155 bp, Homo sapiens
ggcacattcggcacgagatggagtgaactgtgacaaagcaaactgctcaaccacctgctttaatggagggacctgtttctaccctggaaaatgtatttgccctccaggactagagggagagcagtgtgaaatcagcaaatgcccacaaccctgtcgaaatggaggtaaatgcattggtaaaagcaaatgtaagtgttccaaaggttaccagggagacctctgttcaaagcctgtctgcgagcctggctgtggtgcacatggaacctgccatgaacccaacaaatgccaatgtcaagaaggttggcatggaagacactgcaataaaaggtacgaagccagcctcatacatgccctgaggccagcaggcgcccagctcaggcagtacacgccttcacttaaaaaggccgaggagcggcgggatccacctgaatccaattacatctggtgaactccgacatctgaaacgttttaagttacaccaagttcatagcctttgttaacctttcatgtgttgaatgttcaaataatgttcattacacttaagaatactggcctgaattttattagcttcattataaatcactgagctgatatttactcttccttttaagttttctaagtacgtctgtagcatgatggtatagattttcttgtttcagtgctttgggacagattttatattatgtcaattgatcaggttaaaattttcagtgtgtagttggcagatattttcaaaattacaatgcatttatggtgtctgggggcaggggaacatcagaaaggttaaattgggcaaaaatgcgtaagtcacaagaatttggatggtgcagttaatgttgaagttacagcatttcagattttattgtcagatatttagatgtttgttacatttttaaaaattgctcttaatttttaaactctcaatacaatatattttgaccttaccattattccagagattcagtattaaaaaaaaaaaaattacactgtggtagtggcatttaaacaatataatatattctaaacacaatgaaatagggaatataatgtatgaactttttgcattggcttgaagcaatataatatattgtaaacaaaacacagctcttacctaataaacattttatactgttaaaaaaaaaaaaaaaaaaaaaa

SEQ ID NO: 255 - DNA, 819 bp, Homo sapiens
  SITE (58): n equals a,t,g, or c
aattgtacgcctgacaggtaccggtccggaattcccgggtcgacccacgcgtccgggngggctccgcccggacccgcgccccgccggggcagcggtggtgagagccccgactccccggacgccgcccgccgtgccatggggttcccggccgcggcgctgctctgcgcgctgtgctgcggcctcctggccccggctgcccgcgccggctactccgaggagcgctgcagctggaggggcagcggcctcacccaggagcccggcagygtggggcagctggccctggcctgtgcggagggcgcggttgagtggctgtacccggctggggcgctgcgcctgaccctgggcggccccgatcccagagcgcggcccggcatcgcctgtctgcggccggtgcggcccttcgcgggcgcccaggtcttcgcggagcgcgcagggggcgccctggagctgctgctggccgagggcccgggcccggcagggggccgctgcgtgcgctggggtccccgcgagcgccgggccctcttcctgcaggccacgccgcaccaggacatcagccgccgcgtggccgccttccgctttgagctgcgcgaggacgggcgccccgagctgcccccgcaggcccacggtctcggcgtagacggtgcctgcaggccctgcagcgacgctgagctgctcctggccgcatgcaccagcgacttcgtaattcacgggatcatccatggggtcacccatgacgtggagctgcaggagtctgtcatcactgtggtgggggccactgctttggaggtgatgggactatcaataagaactctgttcacg

SEQ ID NO: 256 - DNA, 756 bp, Homo sapiens
  SITE (334): n equals a,t,g, or c
  SITE (614): n equals a,t,g, or c
  SITE (660): n equals a,t,g, or c
  SITE (688): n equals a,t,g, or c
  SITE (730): n equals a,t,g, or c
catcaaaggtggcaaataagtactgtcttaccacacctcttttccttcctctctgttctaggtctctggggtctgatcaataatgctggtgttcccggcgtgctggctcccactgactggctgacactagaggactacagagaacctattgaagtgaacctgtttggactcatcagtgtgacactaaatatgcttcctttggtcaagaaagctcaagggagagttattaatgtctccagtgttggaggtcgccttgcaatcgttggarggggctatactccatccaatatgcagtgggaaggtttcatgacagyttagamgggacatgaaagcntttggtgtgcacgtctcatgcattgaaccaggattgttcaaaacaaacttggcagatccagtaaaggtaattgaaaaaaaactcgccattkgggagcagctgtctccagacatcaaacaacaatatggagaaggttacattgaaaaaagtctagacmaactgaaaggcaataaatcctatgtgaacatggacctctctccggtggtagagtgcatggaccacgctcttaacaagtctcttccctaaagactcattatgccgctgggaaaagatgccaaantttctgggatacctctgtcttcacatggccagcagctttgcaaganttttattgttggaaacagaaagcagagngggctaatcccaaggcagtgtggattccagcttaaccacaanggtctcctccaggctatggaaattgg

SEQ ID NO: 257 - DNA, 498 bp, Homo sapiens
  SITE (430): n equals a,t,g, or c
  SITE (469): n equals a,t,g, or c
  SITE (488): n equals a,t,g, or c
  SITE (489): n equals a,t,g, or c
ggaacctgaggattcctcacacatgtagtactcagagctctacggaaacccaggcacctcgacctcaagaggatcagcctggccagggtggcacaactcttccttccccgtgcacagcaggaaagctgccatcagctgagcaagtccaccaacagtttctgtgtcccacttcatctttaataaggaaaactaaagattgaagacatcactgataagtacatttttatcactggatgtgactcgggctttggaaacttggcagccagaacttttgataaaaagggatttcatgtaatcgctgcctgtctgactgaatcaggatcaacagctttaaaggcagaaacctcagagagacttcgtactgtgcttctggatgtgaccgacccagagaatgtcaagaggactgcccagtgggtgaagaaccaagttnggggagaaagtctctgggggtctgatcaataatgctggngttccccggcgtggtgggnncccatgaat

SEQ ID NO: 258 - DNA, 1529 bp, Homo sapiens
ggcacgagcttctgttcaataaccgcttggtgcacttggacgagcatgccttccacggcctgcgcgcgctcagccatctctacctgggctgcaacgaactcgcctcgttctccttcgaccacctgcacggtctgagcgccacccacctgcttactctggacctctcctccaaccggctgggacacatctccgtacctgagctggccgcgctgccggccttcctcaagaacggcctctacttgcacaacaaccctttgccttgcgactgccgcctctaccacctgctacagcgctggcaccagcggggcctgagcgccgtgcgcgactttgcgcgcgagtacgtatgcttggccttcaaggtacccgcgtcccgcgtgcgcttcttccagcacagccgcgtctttgagaactgctcgtcggccccagctcttggcctagagcggccggaagagcacctgtacgcgctggtgggtcggtccctgaggctttactgcaacaccagcgtcccggccatgcgcattgcctgggtttcgccgcagcaggagcttctcagggcgccaggatcccgcgatggcagcatcgcggtgctggccgacggcagcttggccataggcaacgtacaggagcagcatgcgggactcttcgtgtgcctggccactgggccccgcctgcaccacaaccagacgcacgagtacaacgtgagcgtgcactttccgcgcccagagcccgaggctttcaacacaggcttcaccacactgctgggctgtgccgtgggccttgtgctcgtgctgctctacctgttcgccccaccctgccgctgctgccgccgtgcctgccgctgccgccgctggccccaaacacccagcccgctccaagagctgagcgcacagtcctcagtactcagcaccacaccgccagacgcacccagccgcaaggccagcgtccacaagcacgtagtctttctggagccaggccggaggggcctcaatggccgcgtgcagctggcagtagctgaggaattcgatctctacaaccctggaggcctgcagctgaaggctggctctgagtccgccagctccataggctccgagggtcccatgacaacctagactgcccagggctcccccacccaggcccccaccctcttgctgctcgccctgctccctgcttcggtccagagaactggcagatactggtgggaagcactgtgcctggccccccagcttcctgtatgggcctcgaaacacaatgggccttctcgctcactggtagagacaggggttgtggtccccaacctgccttctgctctgcccctgcacaggacccaaaggccccaggccctgcaaggtgtgctagttcctgctttcccgcggacttcctagtgcccaaatgccctgtgaggctgagagacccaggcccctgtggctttcaacacagcacagctgtggaagtggctgtgttcttctacagcctgtggaagaacccctgtagcagagcctcccgtccaccgtcaggggctgaggcagctc

SEQ ID NO: 259 - DNA, 2204 bp, Homo sapiens
ctggcgtgggatacccgtaccacagaaatgcagggaccattgcttcttccaggcctctgctttctgctgagcctctttggagctgtgactcagaaaaccaaaacttcctgtgctaagtgccccccaaatgcttcctgtgtcaataacactcactgcacctgcaaccatggatatacttctggatctgggcagaaactattcacattccccttggagacatgtaacgacattaatgaatgtacaccaccctatagtgtatattgtggatttaacgctgtgtgttacaatgtcgaaggaagtttctactgtcaatgtgtcccaggatatagactgcattctgggaatgaacaattcagtaattccaatgagaacacctgtcaggacaccacctcctcaaagacaacccagggcaggaaagagctgcaaaagattgtggacaaatttgagtcacttctcaccaatcagactttatggagaacagaagggagacaagaaatctcatccacagctaccactattctccgggatgtggaatcgaaagttctagaaactgccttgaaagatccagaacaaaaagtcctgaaaatccaaaacgatagtgtagctattgaaactcaagcgattacagacaattgctctgaagaaagaaagacattcaacttgaacgtccaaatgaactcaatggacatccgttgcagtgacatcatccagggagacacacaaggtcccagtgccattgcctttatctcatattcttctcttggaaacatcataaatgcaactttttttgaagagatggataagaaagatcaagtgtatctgaactctcaggttgtgagtgctgctattggacccaaaaggaacgtgtctctctccaagtctgtgacgctgactttccagcacgtgaagatgacccccagtaccaaaaaggtcttctgtgtctactggaagagcacagggcagggcagccagtggtccagggatggctgcttcctgatacacgtgaacaagagtcacaccatgtgtaattgcagtcacctgtccagcttcgctgtcctgatggccctgaccagccaggaggaggatcccgtgctgactgtcatcacctacgtggggctgagcgtctctctgctgtgcctcctcctggcggccctcacttttctcctgtgtaaagccatccagaacaccagcacctcactgcatctgcagctctcgctctgcctcttcctggcccacctcctcttcctcgtggggattgatcgaactgaacccaaggtgctgtgctccatcatcgccggtgctttgcactatctctacctggccgccttcacctggatgctgctggagggtgtgcacctcttcctcactgcacggaacctgacagtggtcaactactcaagcatcaatagactcatgaagtggatcatgttcccagtcggctatggcgttcccgctgtgactgtggccatttctgcagcctcctggcctcacctttatggaactgctgatcgatgctggctccacctggaccagggattcatgtggagtttccttggcccagtctgtgccattttctctgcgaatttagtattgtttatcttggtcttttggattttgaaaagaaaactttcctccctcaatagtgaagtgtcaaccatccagaacacaaggatgctggctttcaaagcaacagctcagctcttcatcctgggctgcacatggtgtctgggcttgctacaggtgggtccagctgcccaggtcatggcctacctcttcaccatcatcaacagcctccaaggcttcttcatcttcttggtctactgcctcctcagccagcaggtccagaaacaatatcaaaagtggtttagagagatcgtaaaatcaaaatctgagtctgagacatacacactttccagcaagatgggtcctgactcaaaacccagtgagggggatgtttttccaggacaagtgaagagaaaatattaaaactagaatattcaactccatatggaaaatcatatccatggatctctttggcattatgaagaatgaagctaaggaaaagggaattcattaaacatatcatccttggagaggaagtaatcaacctttacttcccaagctgtttgttctccacaataggctctcaacaaatgtgtggtaaattgcatttctcttcaaaaaaaaaaaaaaaaaaaatgacc

SEQ ID NO: 260 - DNA, 3013 bp, Homo sapiens
tttcgaaattaaccctcactaaagggaacaaaagctggagctccaccgcggtggcggccgctctagaactagtggatcccccgggctkyaggaattcggcacgagggtaactgggggtgttatactgagcagcagcgttgtgatgggtattggcattgcccaaatggaagggatgaaaccaattgtaccatgtgccagaaggaagaatttccatgttcccgaaatggtgtctgttatcctcgttctgatcgctgcaactaccagaatcattgcccaaatggctcagatgaaaaaaactgctttttttgccaaccaggaaatttccattgtaaaaacaatcgttgtgtgtttgaaagttgggtgtgtgattctcaagatgactgtggtgatggcagcgatgaagaaaattgcccagtaatcgtgcctacaagagtcatcactgctgccgtcatagggagcctcatctgtggcctgttactcgtcatagcattgggatgtacttgtaagctttattctctgagaatgtttgaaagaagatcatttgaaacacagttgtcaagagtggaagcagaattgttaagaagagaagctcctccctcgtatggacaattgattgctcagggtttaattccaccagttgaagattttcctgtttgttcacctaatcaggcttctgttttggaaaatctgaggctagcggtacgatctcagcttggatttacttcagtcaggcttcctatggcaggcagatcaagcaacatttggaaccgtatttttaattttgcaagatcacgtcattctgggtcattggctttggtctcagcagatggagatgaggttgtccctagtcagagtaccagtagagaacctgagagaaatcatactcacagaagtttgttttccgtggagtctgatgatacagacacagaaaatgagagaagagatatggcaggagcatctggtggggttgcagctcctttgcctcaaaaagtccctcccacaacggcagtagaagcgacagtaggagcatgtgcaagttcctcaactcagagtacccgaggtggtcatgcagataatggaagggatgtgacaagtgtggaacccccaagtgtgagtccagcacgtcaccagcttacaagtgcactcagtcgtatgactcaggggctacgctgggtacgttttacattaggacgatcaagttccctaagtcagaaccagagtcctttgagacaacttgataatggggtaagtggaagagaagatgatgatgatgttgaaatgctaattccaatttctgatggatcttcagactttgatgtgaatgactgctccagacctcttcttgatcttgcctcagatcaaggacaagggcttagacaaccatataatgcaacaaatcctggagtaaggccaagtaatcgagatggcccctgtgagcgctgtggtattgtccacactgcccagataccagacacttgcttagaagtaacactgaaaaacgaaacgagtgatgatgaggctttgttactttgttaggtacgaatcacataagggagattgtatacaagttggagcaatatccatttattattttgtaactttacagttaaactagttttagtttaaaaagaaaaaatgcagggtgatttcttattattatatgttagcctgcatggttaaattcgacaacttgtaactctatgaacttagagtttactattttagcagctaaaaatgcatcacatattcatattgttcaataatgtcctttcatttgtttctgattgttttcatcctgatactgtagttcactgtagaaatgtggctgctgaaactcatttgattgtcatttttatctatcctatgttaaatggtttgtttttacaaaataataccttattttaattgaaacgtttatgcttttgccaacacatcttgtaacttaatatactagatgttaaggttgttaatgtacaaaaaaaaaacccttatactcacctgcgttttcatttgtttgacatttgtctattattggatttcattatcatatgaacttgtcagtgggaaacaaactgtctaaaaatttttctcttacgtttaacatacaatcatgtgaaatttaggcagagttcgataaattactggcaaaaacaaaactcttttataaagattttctaatgttgactttaatactctaacatggtacaaaccaaatggtaaaatcccaagtcatttcttttttcatctctatttagcaacagaattaagtggatgaagatattctactatgcattaaatcttgaactttataaaacatgtacaaaaattgtacaagataagttccacctggtaatgtctttccctaatacagggttgcgcttgcattggaccctagggatttgcactaaaattatatcaaggtctcagatgagcttagtgcacaagcactatcactttaaatactattatttgctaccacagcaactatatatttccatagcttttggctgggggcgggggacatttttattacaacttgaaattgctttgctggtttcatatttatttgttgtatttaaaaaatacattgttgtaagagtgattttttcaatatattttattcctgggggggatcatgctacactctcaaaagaaaattaagaaatcattcagatcatcccccctttttaagtagtgtgaattgcaaaacccaacatattttttttactgtcagttgcggtttatttattctttaactgtctgttttagtagtttaatgattatgaaaaatgtatctgtgtgtgatttgctatttattaaattttaagtactttgctgaatgtcattttaaagcatgtttgaagtcttgtgtatttgtctgtgttaatgctgtcaggaggaactgactaagatgttttaatatgtatcaaaaattaaaatgattttttttattgccttgaaaaaaaaaaaaaaaaaactcgaggggggcccgtcccaatcccctatagggcga

SEQ ID NO: 261 - DNA, 1271 bp, Homo sapiens
  SITE (4): n equals a,t,g, or c
  SITE (11): n equals a,t,g, or c
  SITE (612): n equals a,t,g, or c
  SITE (1087): n equals a,t,g, or c
  SITE (1158): n equals a,t,g, or c
  SITE (1197): n equals a,t,g, or c
  SITE (1212): n equals a,t,g, or c
  SITE (1233): n equals a,t,g, or c
  SITE (1262): n equals a,t,g, or c
  SITE (1263): n equals a,t,g, or c
gccnctctgcngggctggcaggaaatgccaagacatagatgagtgcagccaggacccgagcctgtgccttccccatggggcctgcaagaaccttcagggctcctatgtgtgtgtctgcgatgagggcttcactcccacccaggaccagcacggttgtgaggaggtggagcagccccaccacaagaaggagtgctacctgaacttcgatgacacagtgttctgcgacagcgtattggccaccaacgtgacccagcaggagtgctgctgctctctgggggccggctggggcgaccactgcgaaatctacccctgcccagtctacagctcaggtcaggagccgggcaggccccttcccagatcttcagtttcttcatctggaagccaaatgtgggaaatggcgccccctggcagttgggaaataggcggcgggctgcagccctaagcccacgcgcgcactcagtcctgcctcttccctccccacggccgccctgcccctgcagccgagttccacagcctctgcccagacggaaagggctacacccaggacaacaacatcgtcaactacggcatcccagcccaccgtggtaagcgccctgcggctccgmccgcccngmgccctctcaccccgggttgggctcgcccggatcccgccgggactcgctgggtcagctgcccgcgccgggtaagccccgcccgsaccttcctcgcargccccgccctgtaggccccgcccytcctgtaggccccgcccggggatggcttcgctccggtggtgcgcccagcccacgcctccgggctgcarctgcgggaccggagcggccagtgtttgtcaccccgcagacatcgacgagtgcatgttgttcgggtcggagatttgcaaggagggcaagtgcgtgaacacgcagcctggctacgagtgctactgcaagcagggcttctactacgacgggaacctgctggaatgcgtggacgtggacgagtgcctggacgagtccaactgccggaacggagtgtgtgagaacacgcgcggcggctaccgctgtgcctgcacgccccctgccgagtacagtcccgcgcagcgccagtngcctgaaccccggaaagagatggacgtggacgagtggcaaggacccgggaagccttgccgcccttgcccgnttgcgtcaaaccttgccggggctcctacccgcttgcgantggtcggcccgcccntggggtgccccgggccccttncgggccgcgaattggccagcttccccgannagccccgg

SEQ ID NO: 262 - DNA, 542 bp, Homo sapiens
  SITE (507): n equals a,t,g, or c
  SITE (508): n equals a,t,g, or c
ggtgtttcctgccctatcacacactgaggaccgtccacttgacgacatggaaagtgggtttatgcaaagacagactgcataaagctttggttatcacactggccttggcagcagccaatgcctgcttcaatcctctgctctattactttgctggggagaattttaaggacagactaaagtctgcactcagaaaaggccatccacagaaggcaaagacaaagtgtgttttccctgttagtgtgtggttgagaaaggaaacaagagtataaggagctcttagatgagacctgttcttgtatccttgtgtccatcttcattcactcatagtctccaaatgactttgtatttacatcactcccaacaaatgttgattcttaatattwagttgaccattacttttggtaataagacctacttcaaaatttattcaggggatttcagttgtgagtcttaatgagggattcaggaggaaaaatcctactagagtcctgtgggctgaaatatcannactggggaaaaaatgcaaagcacattgggatcct

SEQ ID NO: 263 - DNA, 1420 bp, Homo sapiens
ccacgcgtccgctttgatggctctaccagtgtggcccaatgcaagaatcgtcagtgtggtggggagctgggtgagttcactggctatattgagtcccccaactacccgggcaactacccagctggtgtggagtgcatctggaacatcaaccccccacccaagcgcaagatccttatcgtggtaccagagatcttcctgccatctgaggatgagtgtggggacgtcctcgtcatgagaaagaactcatccccatcctccattaccacttatgagacctgccagacctacgagcgtcccattgccttcactgcccgttccaggaagctctggatcaacttcaagacaagcgaggccaacagcgcccgtggcttccagattccctatgttacctatgatgaggactatgagcagctggtagaagacattgtgcgagatggccggctctatgcctctgaaaaccaccaggagattttaaaggacaagaagctcatcaaggccttctttgaggtgctagcccacccccagaactacttcaagtacacagagaaacacaaggagatgctgccaaaatccttcatcaagctgctccgctccaaagtttccagcttcctgaggccctacaaatagtaaccctaggcttagagacccaattttttaagcccccagactccttagccctcagagccggcagccccctaccctcagacaaggaactctctcctctctttttggagggaaaaaaaaaatatcactacacaaaccaggcactctccctttctgtctttctagtttcctttccttgtctctctctgcctgcctctctactgttcccccttttctaacacactacctagaaaagccattcagtactggctctagtccccgtgagatgtaaagaaacagtacagccccttccactgcccattttaccagctcacattcccgaccccatcagcttggaagggtgctagaggcccatcaaggaagtgggtctggtgggaaacggggaggggaaagaagggcttctgccattatagggttgtgccttgctagtcaggggccaaaatgtcccctggctctgctccctagggtgattctaacagcccagggtcctgccaaagaagcctttgatttacaggcttaatgccagcaccagtcctctggggcacatggtttgagctctggacttcccacatggccagctttcttgtctatacagatcctctctttctttccctacgtctgcctggggtctactccataagggtttacaaatggcccacaacactgagttagtggacaccggctaaatgaggaagagcagcaggcattgtcatggtgaatgccccgctgtagctccctgagagaaagactgtaactctgcaggacagaaacaaggtttaaagcattggccaaaaaa

SEQ ID NO: 264 - DNA, 1104 bp, Homo sapiens
gagaattcctgagttttgctgatgacttactctctggcctgggcacatcttgtgtagcasctggtcgaagccatrgagaggtccctgaagtcagtatctactcagtcatcttcaagtgtctggagcccgacggtctctacaagttcactctgtatgctgtggatacacgagggaggcactcagagctaagcacggtgaccctgaggacggcctgtccactggtagatgacaacaaggcagaagaaatagctgacaagatctacaatctgtacaatgggtacacaagtggaaaggagcagcagatggcctacaacacactgatggaggtctcagcctcgatgctgttccgagtccagcaccactacaactctcactatgaaaagtttggcgacttcgtctggagaagtgaggatgagctggggcccaggaaggcccacctgattctacggcgactggagagggtgagtagccactgctccagcctcctgcggagtgcctacatccagagccgcgtggaaacagtgccctatcttttctgccgcagcgaggaggtccggcctgcaggcatggtgtggtatagcatcctcaaggacaccaaaatcacgtgtgaggagaagatggtgtcaatggcccgaaacacgtacggggagtccaagggccggtgagggagggtattgccctccgtgagcacagagactctccatgggagggggagcagtattctcctggatcctggggcctgggtgggctgggggacagctgaggatgggcctagcagatgaagcttgccagcaaggccaaagcaaacggtttctcctgtggatagtggacagagacctttgtaaccaatggaattattcatttttctctatcttttattttttcaaagatattatttgactctatmaaaagtctctcctttttaaaccttttcttatggatggctgtcaatcccaaggcagaagttttcaggtggagaccaagcggcctttgctcttcttccttcttcctgccacactctgctttcttcctgccatggacccctggaggagacctatggagggacagttttgacctgacccctagaggagacagttttgacct

SEQ ID NO: 265 - DNA, 2925 bp, Homo sapiens
ggtacgcctgcaggtaccggtccggaattcccgggtcgacccacgcgtccgcagggaggggtgcgaggctagccacgcaggcggggccctgggtcattttaaactctcagagtgaacgtcttgataggaccgacaagacgcatgacatgtacttagaaagcttatcttagagccacactgagattggaacccgcaaaatatgccaggaaacgccaccccagtgaccaccactgccccgtgggcctccctgggcctctccgccaagacctgcaacaacgtgtccttcgaagagagcaggatagtcctggtcgtggtgtacagcgcggtgtgcacgctgggggtgccggccaactgcctgactgcgtggctggcgctgctgcaggtactgcagggcaacgtgctggccgtctacctgctctgcctggcactctgcgagctgctgtacacaggcacgctgccactctgggtcatctatatccgcaaccagcaccgctggaccctaggcctgctggcctgcaaggtgaccgcctacatcttcttctgcaacatctacgtcagcatcctcttcctgtgctgcatctcctgcgaccgcttcgtggccgyggtgtacgcgctggagagtcggggccgccgccgccggaggaccgccatcctcatctccgcctgcatcttcatcctcgtcgggatcgttcactacccggtgttccagacggaagacaaggagacctgctttgacatgctgcagatggacagcaggattgccgggtactactacgccaggttcaccgttggctttgccatccctctctccatcatcgccttcaccaaccaccggattttcaggagcatcaagcagagcatgggcttaagcgctgcccagaaggccaaggtgaagcactcggccatcgcggtggttgtcatcttcctagtctgcttcgccccgtaccacctggttctcctcgtcaaagccgctgccttttcctactacagaggagacaggaacgccatgtgcggcttggaggaaaggctgtacacagcctctgtggtgtttctgtgcctgtccacggtgaacggcgtggctgaccccattatctacgtgctggccacggaccattcccgccaagaagtgtccagaatccataaggggtggaaagagtggtccatgaagacagacgtcaccaggctcacccacagcagggacaccgaggagctgcagtcgcccgtggcccttgcagaccactacaccttctccaggcccgtgcacccaccagggtcaccatgccctgcaaagaggctgattgaggagtcctgctgagcccactgtgtggcagggggatggcaggttgggggtcctggggccagcaatgtggttcctgtgcactgagcccaccagccacagtgcccatgtcccctctggaagacaaactaccaatttctcgttcctgaagccactccctccgtgaccactggccccaggctttcccacatggaaggtggctgcatgccaaggggaggagcgacacctccaggcttccgggagcccagagagcatgtggcaggcagtggggcctcttcatcagcagcctgcctggctggctcccttggctgtgggcaggtagcacgcctgctggcagaggtacctggtggctgccctgttcgcatcagtggcgatgactttatttgcggagcatttctgcaagcgttgcctggatgcggtggtgcattgtgggccctctgggctcctgcctcagaatgtcagtgagcaccatgctggaggtcacccagcactgtggcagcgcccaggagggcatagggcagcctaccacctccaagggggcaggcgccctcatctggggttgggtctgtgctgagctggagggcctctagggaaccgtggggcagggtggccagctgctggctcccagagcgcagccaggcgtcctcaacggggagccccaaatgtccacgcccagaacaacagttggcaggacaggtgtgacacagccacagcagaggcaaggggtgccaggagtccccagcggcatcctcggggagatgctggtgaggggtccgtacagggtggggtccccaccyctagccccttactgargggggagtgcagcagttggcctgcttgtctggcggagaaagccagctccctgcaccctcggggctgagtcagatctgggtctgccgcaaaggccttgcctagaccaggtcacactgatgccctggtttccctatctgtaaaatggggccaatgacacctacctcactgggtcaccatcgagatcaatcctcctccctgccccgacacctcgggcacatcgcatgcactcagagcacagagccgggcagacgcagcacctgcatggggagcccagtgcccggcacagcacaggggcttccagggaggccacgcagggccgtggggctgagccacgctctcgttttgtcaggcagctatgcagttgctcttccttgtttttgttttgtttttgtttttgtttttaatatttatttttttagagacagggccttgctctgttgcctgggctggagaacagtggcaccatcatagctcactgcagcctcaaactcctgggctcaagcgatcctccccgctcagcctcctgagtagctgggactacaggtgtgcaccaccacacccagccaaaacagccatcctccccttgagagtcatcagaaaaatacattaggaaaatgtgtttagaaataaaagcacaaggcagggcagtgctcacgcctgtcatcccagcactttgggaggccgagacgggaggatcagttgaggtcaggagtttgagaccagcctcggcaacatggcaaaatcttgtctcttttttttggtattaaaaaaatcataaaaataaaagaaataatgcaaaaaaaaaaaaaaaaaaa

SEQ ID NO: 266 - DNA, 1104 bp, Homo sapiens
ggcacgagccgacatccactttctggagcctctggagtccggccgccccacaaggctgagctgcagccttccaggatcctgtgaagcgggaccacctctcacattctcctggacggggaatgccctcagccccctggaccccgagaccacccgctcctcggagctcaccctcacccccaggcccgaggaccatggcaccaacctcacctgtcaggtgaaacgccaaggagctcaggtgaccacggagagaactgtccagctcaatgtctcctatgctccacagaacctcgccatcagcatcttcttcagaaatggcacaggcacagccctgcggatcctgagcaatggcatgtcggtgcccatccaggagggccagtccctgttcctcgcctgcacagttgacagcaacccccctgcctcactgagctggttccgggagggaaaagccctcaatccttcccagacctcaatgtctgggaccctggagctgcctaacataggagctagagagggaggggaattcacctgccgggttcagcatccgctgggctcccagcacctgtccttcatcctttctgtgcagagaagctcctcttcctgcatatgtgtaactgagaaacagcagggctcctggcccctcgtcctcaccctgatcaggggggctctcatgggggctggcttcctcctcacctatggcctcacctggatctactatacctctggggttcaagcaattctcctgcctcagcctccctagtagctgggattacaggtgcctgccaccacacccagttaattttttttttgtatgttagtagagatggggttttaccatgttggccaggtctcgaactcctgacctcaagcaatccactgcattggcctcccaaagtgctggcattacaggtatgagccaccgtgcctggctgccaaaagttaccttcttaacacttgaatttctggtctcctcagcttccctatccatataggcacagagaggcagcatttgttttccagttaaaactctacctcattgtgattattatccaatacaattgttacaaaataagtaaaacttttatgaaacaataaaaaaaaaaaaaa

SEQ ID NO: 267 - DNA, 441 bp, Homo sapiens
  SITE (14): n equals a,t,g, or c
  SITE (35): n equals a,t,g, or c
  SITE (62): n equals a,t,g, or c
  SITE (117): n equals a,t,g, or c
aaaattagtgcagnggagaaaacaatttttaatgnaatcttgattttacctcatatactgtncattccaaaaactctaaactttttaaagattatagatacactaccaaacatatcnccttaaaattgtataaggctgaatgaacttcatacaaatgaaaaaaatctcataaaaatacataaactatgtagcaaaagtatctgtaaaatccatggaaaataaaagttgtatcattctttttgagatacgtttattgtattcatatatattcattatttgctacctgtttaagaaagtgaaatgttatggtctcccctcttccaatgagcttaaaacatttttcccaacagtatataaatcttcaacatgagaggatgtatatttattatataaagcccagtaaagaataaaattagaagttttatcctagtaaaaaaaaaa

SEQ ID NO: 268 - DNA, 261 bp, Homo sapiens
accattcatgaaggagccatcctcaagatccagtcatctcataccaggtccacctccatctaatattgggaattacaattcatcatgagggttggtggagacatggatccaagccatgtcacatattatcctgactgtagtggtttaagataacaatttttatctcacaattwattttgaatacaggcatgatttasctgtgtcctttggttcagtatctcttcaaagctgtaatcaggtttttcatgtgtttgtcatcaa

SEQ ID NO: 269 - DNA, 370 bp, Homo sapiens
  SITE (56): n equals a,t,g, or c
  SITE (356): n equals a,t,g, or c
  SITE (368): n equals a,t,g, or c
tcgacccacgcgtccgtgacaatttgggtaataatgagaaacaaaagggcactggnagtcagggctactgggttcaaatttcaattctattacttgctgactgtgttactttggtatgttaatcaacttcagtaccatcaggaaaatgggagtgatagtactcacatagttgtgatgcatgaaaactgcttagcgcgtaatgcttgataaatggaagctactataattatgtctgggaggtacatctttattattaacaccattatttttgctaacaagtattaacagcactgccacaataaagaatttactcccaagcgaggcattacctcacttggatgggggtataaaaagtnaacagggagccngg

SEQ ID NO: 270 - DNA, 354 bp, Homo sapiens
  SITE (331): n equals a,t,g, or c
  SITE (349): n equals a,t,g, or c
agggaatacttaactcagagttgtcacaagaatgaaataatatgatatctataaagcacccagcacaatgcctcgcacaatgcctgaacgttaacagttgttatgtctttagctatatttgtcatctgtgarttgaaacttattatacaagctatggttcctcttagctccaaacttctgagatcccatgacctttaagagcagctatgcagttcagaatattaagtttgcgctcctaaatctctgcagacgtgctgggcaggttggactgtctcccagttaatagggatggcagaactgggccacattcaggggctgggccaacaagggntggggatggggaaggggnaccat

SEQ ID NO: 271 - DNA, 393 bp, Homo sapiens
  SITE (143): n equals a,t,g, or c
  SITE (365): n equals a,t,g, or c
  SITE (368): n equals a,t,g, or c
aattcggcacgagggatcctggtaaatttttgttccctcgctttgttagttttttattttattattttcaaaactattaaaagtaatgcaaattaagggttttgacttacattccttaggacatgaatggcaagatgaatttnctcatattatggcaatgacagatccagcctttgggtcttcgggaagaccattgttggttttatcttgtatttctcaaggggatgtaaaaagaatgccctgtttttatttggctcatgagctgcatctgaatcttctaaatcacccatggctggtccaggatacagaggytgaaactctgactggttttttgatggcattgagtgggtttttgaggagtgganctnagcgtgcaagtggttctcttttcag

SEQ ID NO: 272 - DNA, 458 bp, Homo sapiens
aaaggttttggtctttgttctaaatagttatgatttgtttttcttttctgttttgtctccagtaaaaaaaagcttatctttttattttctccctagcttcaaaatagatttttgtctggacataaaatctgttctttaatcttatatctctaaacaaaaccatatggcttactgtcacttctttggcaaggcttgagtttctttcaggatatgttgtaaagttcccataggctgtaagttgacctcacctatagagttagaattgtaaargagctacattcctattccaaawtttctgcaaagtgccagattgcagcttattactcttctagagccccccatawttacgtyctttttccttcccaggaatcctcctcactcactctctattgcagccaagacatgtttgggctaggaccaggggaaggccataggaaataatgtaaccccttattcag

SEQ ID NO: 273 - DNA, 302 bp, Homo sapiens
  SITE (254): n equals a,t,g, or c
  SITE (255): n equals a,t,g, or c
  SITE (290): n equals a,t,g, or c
aaaaaaccgcggcctatacacagtggcttcccctacctaaacatgaacttgttgttaccaagccaccactgcatttataaccaaatggccatgtaaaaaacacgacagcaacttcccagagccccatttaacaaggacttagtagataaaaatgccttttcttgaggggaaaatgcataaacatcttttattttccacactagaggaactgggacacgcttttcaccactgctgggactgggaaaaagttcagnnccctggtgggaccgccgacttgcaggtggaaccgnggggaggcaact

SEQ ID NO: 274 - DNA, 378 bp, Homo sapiens
  SITE (341): n equals a,t,g, or c
  SITE (371): n equals a,t,g, or c
ggcagagactcattgctatgcatttatagatcaaagaggagcagatattttatgttaattggataacacctagttctatcaggtcagtaacctggggtccctggggctcccccatgggtcataccagatagatagattttttaaaaatttgttggaattaaagtagaatcaaagcctagtgctagcccagaataagttattcaataaatgcttgttgagtgaataatcatccgaaatgattataatactgcctaccattcgttgaaagcttcagtatgtgggagaatctgtcctgggcactttatatacacccataatctgtttgggtttcttggtaggangactacatggctgcatacctggtctttccnttactcc

SEQ ID NO: 275 - DNA, 326 bp, Homo sapiens
  SITE (316): n equals a,t,g, or c
tttaaccatgrgaaaccgcccccatgatccaatcacctcccaccaggccccatctccaacattggggattacagttcaccatgagatttgggcaggtaacacaaatctaaaccatatcaccattcaagtttttaatcttcataaatgccaaggttttaaaagactgccgggtagtcctaaattgctccactgagcagattargcaattactaatgagtagcgtcattttaaatacatgcaaaacttattggtatagtgacmatgaagcwttwaactaaggttaccataactgggggttttagggaaattttcatcncgagttggca

SEQ ID NO: 276 - DNA, 251 bp, Homo sapiens
aattcggcacagatattattttattatcaaatgtacagtatattgaccttaaaaatacagtaaagcagtcatggaaataacaggtcgtgtattattcatgggcacaaactgactcatggctggggaagaagcagccaccttagaccagrtggacaagccagatactgcagagaagcggcacgagggggggcccggtacccaattcgccctatagtgagtcgtattacaattcactgggcgtcgttttacac

SEQ ID NO: 277 - DNA, 447 bp, Homo sapiens
  SITE (431): n equals a,t,g, or c
ggcggaggttgcagtgagccaggatcgtgccactgcactttatttagccaggacaacactctgtctccaaaaaaaagtttctgaaggtaaaagatatactaaaggatatacatatactgcctcttctatgatgtttcatttgacctacaccatcagcatcttcaggaaacagtatgaaactaatttcacattaaatgttgcaaacgtctgcaattctccagtttttagtttgcacgtaaggattcgtaggattgatttcagattgacagatggttgtagtaacaaaaaaatgaattgcctkggagaattcgagttattttaggcctgccttggacacttttatgcacttaattcactggccaattagtctaactcctcaaccatcgtggtatggacttccccagtccccccaatgggaaggcctttgaacnaaccccgagtcagtag

SEQ ID NO: 278 - DNA, 580 bp, Homo sapiens
  SITE (291): n equals a,t,g, or c
gctcagaacaccaactgctgaggctgccttgggaagaggatgatcctaaacaaagctctgctgctgggggccctcgctctgaccaccgtgatgagcccctgtggaggtgaagacattgtggctgaccacgttgcctcttgtggtgtaaacttgtaccagttttacggtccctctggccagtacacccatgaatttgatggagatgagcagttctacgtggacctggagaggaaggagactgcctggcggtggcctgagttcagcaaatttggaggttttgacccgcagtgncactgagaaacatggctgtggcaaaacacaacttgaacatcatgattaaacgctacaactctaccgctgctaccaatgaggttcctgaggtcacagtgttttccaagtctcccgtgacactgggtcagcccaacaccctcatytgtcttgtggacaacatctttcctcctgtggtcaacatcacatggctgagcaatgggcaskcagtcacagaaggtgtttctgagaccagcttcctctccaagagtgatcatccttcttcaagatcagttacctcaccttcctccct

SEQ ID NO: 279 - DNA, 363 bp, Homo sapiens
  SITE (353): n equals a,t,g, or c
acctggaggcggacatgttggtgagttgagccgccggacaaggggaaaagagctcggggggcgggttcggcaccattcatattcttccgctcggtaggaggtgaggacacgaccctcaaccgttgctcctgtagcttccgagtcctggtggtgtcggccaagttcgaggggaaaccgctgcttcagagacacaggctggtgaacgcgtgcctagcagaagagctcccgcacatccatgcctttgaacagaaaaccctgaccccagaccagtgggcactgagcgacagaaatgagggatgggatctgcacagccattaaatataaatctgggaaaaaaaaaaaaaaaaaattcnggggggggcc

SEQ ID NO: 280 - DNA, 623 bp, Homo sapiens
gaattactttgattactttggtctcaattatttgtcaccccagttaaacatgaaaggttgcagtgcttcctgttcccttactggaagtyagctttttcttttctctttcttcctttctttctctctctctctctcactcactcactcacagatttgctaatgccacagaaagggctcttttaacttaagataagtgaaaagtactaaaaaagattcaggtaattatcattcagcactttattgtaattcagaataaaatttatgatggcatatttgcctgcaaatgtcttaatgaagttgttctcaataaaaagctccttattgatttgagaaaaactcagtttacctgtgagttcaatgagctggatcactcacttggatttttgtgttgacattttattctgagggttgatgttacactatttaaggagtcatcaatgcaaacagtcacattaggtatgtcatcatctttagtcagtaaaaaccttgtaatgaggagtagtaaataaacaagagaacattagactttttggttaaataattggagatttaatttttaaaagatattccttactccatttgcctagggttgtaaatttggatttcaccattaagaaaagggt

SEQ ID NO: 281 - DNA, 876 bp, Homo sapiens
  SITE (517): n equals a,t,g, or c
  SITE (585): n equals a,t,g, or c
  SITE (703): n equals a,t,g, or c
  SITE (854): n equals a,t,g, or c
gagatattccaatttgcatcactctttctgtggctcaaataatgatgattatggaatgaattttaatgtccctacttgtgaataattagctttctcaaatgtaggctttttacaaattttaaattttaaaatattagtttaaatgtgtgttatactgataaaatttcatctttcaaattatagtctattattttaaagggatttttcagtatgatatgggccattttgttcatctatcgcaaagtaaaaatgtaaaatccttacagagaattgtttcacaaaacttatatttcatgtcaattgtatttattttaataatagctcacaatgcctttagtaagtaataaagtctcttattagaatcttgtattttttaattgagctaatcaaaataattcagccaagtctatttgaaatagaaaactgtctatttaatatagtaaaatcaatgctcccttaatgttgttacaaagatatggtaactgtaatatgggtaaaagttwatycaagaaaagantacttggtagaagattctttaacaaattgaggagattgattcataattcacatgtcaattttttatantaatatgtacttctaatttattatttatacttaaattgtgacctgaaagatgagttggagataattagtcaaagggcacatggaattatggaaagggggcatttttgattaacccatnacatagaaaataaatatcccttaattaccttgaaaccatatttatactattaattttgtccagtgcacttttttccaaatacagaaaaaaatctccattatagttaccaattttagttggtgatcccattgaatgaataccacatactttngggccaataattgaattaatgc

SEQ ID NO: 282 - DNA, 262 bp, Homo sapiens
  SITE (10): n equals a,t,g, or c
cccctccggnccacccggcccctgtgcaccagccaccgccgctgccacaccggcccccgcccccacccccctccagctacatgaccgggatgtccaccaccagctcctacatgtctggagagggctaccagagcctgcagtccatgatgaagaccgagggaccctcctacggtgccctgycccccgcctacggcccacctgcacacctgccctaccacccccatgtctayccgcccaaccggcccccgccacctgtgcctcc

SEQ ID NO: 283 - DNA, 338 bp, Homo sapiens
  SITE (310): n equals a,t,g, or c
  SITE (320): n equals a,t,g, or c
  SITE (338): n equals a,t,g, or c
cgcctgcaggtcgacactagtggatccaaagaattcggcacagaaaatactattatgagatggacatttatgtgaagcatgaggggcaattctgatttgattggatattgtttttaaaggaactaaggtctttgtagctgcatgtcagctaggtcatcagttacattttagagacaggatttttgtttatacttaaacttcagacaaattggcagcatataattgttcctttatacatgagataatrtgatgatataactgatgtttaagaacattcttattgtaagacagtttctgttttgccacagcnacccaaaggncagttaagatatgtaccn

SEQ ID NO: 284 - DNA, 437 bp, Homo sapiens
  SITE (7): n equals a,t,g, or c
  SITE (19): n equals a,t,g, or c
ttccccnccctataagggncccccagtcatattgggttagggcccccacccataaggcctcatttaacttaattaccctttaacggccctatttacaaatmcagtcatmctttgaagtactgggggtgtggattccaacacatgagttttgaggggatgcaattcagcccatagcatgtggtaatgtagaatgtatgtacagtcaataaaggaaagaatataatatttttaattatatttagaaaaaatataactttatgtatcaaggaacatgataagcaaagtaaaaagaaaaataacaaactaggaaaacatatttccattgcacatcacggacagtgttacctgttctaatatacagtgtcccaaaacagggaagagcaaccacatagaaagatgtggttgagagaaatgaacatagttcggagaaaaaaaaa

SEQ ID NO: 285 - DNA, 457 bp, Homo sapiens
  SITE (14): n equals a,t,g, or c
  SITE (30): n equals a,t,g, or c
  SITE (47): n equals a,t,g, or c
  SITE (130): n equals a,t,g, or c
attaaaatggaagnaaaggcaagccaaatnaaattccagcctggatnaccaacccgtatccaagaacaaaaatgggaggaggtgcccccacattatggtgtgtaataggtaacatggggaaaatgcctantcctgtgttttggaaaagaagaaatagtgcccgtccctatttatttcctatatttagaaatttttcctcaaagaaatttcaattgtatctatgagatgggtttctaagtatcttattgtgtgttataagtgccttttaatatcatactaagtgtgagcttctggacattttcaagagcttacaaaaactaagtggcattgtatttttataaccccattgagaagactaagtaagaaatgaaatgtcctatcaattttattttgtcatgcttcaaacaataaagacatttctgctttaaaagaaaaaaaaaaaaaaaaaaaaaaaagg

SEQ ID NO: 286 - DNA, 417 bp, Homo sapiens
aaaagataggttcaaatccyagctagggaaaaaaagatagaagtcactagackggcatattctacaaaagcataattgctagactttcttatgcgtcctgcctttgtaactgctgttgcctctgcctgatctcctttccacctactctttcccacaaactaattcatgtgcttcaaaactactatttttttcgtatcatttctaatatggtgcttgatgcctagaacatgtagtcatctatgtaatgcccattcccaacaaacttccaagcttttgttaatgctggaataaattaatataaacctaaagtttatgaattagtataaacctaaatgtctgaaaataatagacatgtagtattgtattcttacctcaaaatatgttgaatcttgccaacattaaatcaacactggtgtt

SEQ ID NO: 287 - DNA, 444 bp, Homo sapiens; identical to SEQ ID NO: 33
  SITE (422): n equals a,t,g, or c
  SITE (425): n equals a,t,g, or c
  SITE (430): n equals a,t,g, or c

SEQ ID NO: 288 - DNA, 417 bp, Homo sapiens
atacagcaactatatttatgtttatctgggcttcatattaaagaacaaaaatgattttaccttaagtgggatataaaataaaggaccttaggaagatggataatatataaacaccaactaggacataatgggaaagtcttgttttttccaggtctagctatttttgatgccagcgggttttaattatgaaaggaatgctttttccatatatttcccctttactctttcaacactaattaatttgtgagcatgtcaattccatatttagttaattgaaaagaatatcaagaggattgagtacttcyaaaattaaatttttaatgraagtcmtttaaattaaagtagrttgtagattaagtgtttaaaaattaagtcaagttttattagaaagggcaaaaccactgggattttagaaga

SEQ ID NO: 289 - DNA, 361 bp, Homo sapiens
  SITE (312): n equals a,t,g, or c
  SITE (340): n equals a,t,g, or c
  SITE (344): n equals a,t,g, or c
tgagtaattattggtgccttttatttaaatcaggcagtgtagtaattgctcaagaatacagtcatgaaaagacttacttcccatgtctttgtggagcctatggtagggtagttaagtagataaaaacatcttaggatgtggagatgttattgcaaggaattgtttagtaaatagtttcaaatatggctgaaaataagagattaaaattaaagttaattgagttcaataactcaaatagtttattgaggcattactatgggttttgaggcagttgttttagggagttatgggcaacagaagccatgattagtnacatcattaagagggaaagaagggaccnccantattttaatgtaacagt

SEQ ID NO: 290 - DNA, 445 bp, Homo sapiens
  SITE (352): n equals a,t,g, or c
  SITE (404): n equals a,t,g, or c
  SITE (423): n equals a,t,g, or c
aaaaagcaaaaaattgaattagatcttttttggcagggtggtaggtgggaaagacattaattattactcatcccattctgcatcaactgtatcttatcaggtttaagatgctattgattgtaagatggatctctatttcagtgatgttgaagtataaaaagtggttgaaatacggtaaatatagattctcggtgtcccaggacctttagagaacattgttttctgtagagtaatagcacatgctgggttcatgttagcccctttcaactttatgtatcattaattaagtgttgatgttctagatatttaatgggacactaacatcaaggatgaccttgtgggtatgtgtccngagcattctagtgaagcctagtgatttagcttcagattatggagatttaacngtctaatgtaggggttagnaatattcctggaaaccgggatt

SEQ ID NO: 291 - DNA, 699 bp, Homo sapiens
  SITE (682): n equals a,t,g, or c
  SITE (688): n equals a,t,g, or c
gaggttctgcaggtacggcccggaatcacgggtcgaccacgcgtccgcccacgcgtccgcccacgcgtccgcccacgcgtccgctgctaacaagcctttggtaagtcacttcagatacttttcctcctttttacaaagagagggctggcttagttatttgccaaagccccttccaggcctgaattccacaagtacgatttactgtagtgtcttatcactctttcatgtcacaatagcgtggagcattagagaaaagcctagacttttagttgatagccagttgaaatatcattgatagaattttagttttaggaaaaattggtttgatttctagctttattactattaggtatgtgagcttgggcaaatcgcttaatctttgagtctagttttctctcaaaatgagaacattaggctaaatgatttccgagtttccagctagtcctagagttctatatttctacatagttgaattattttatcatgctgttgytggggaatatgactaacccttttgaagctactaattttatgtcgagctttaaagtccataattgttatcttcagaaaatattatttgacctacagtatgtccaaatcaatttaataaaatcgctttataacagggaaaaaaaaaaaaaaaaacccgggggggggcccgttacccattgggccctagtgngtcgtnttacaattcaa

SEQ ID NO: 292 - DNA, 489 bp, Homo sapiens
  SITE (451): n equals a,t,g, or c
  SITE (454): n equals a,t,g, or c
  SITE (465): n equals a,t,g, or c
cgctctgggacactcagtctgatggggcaggctggtcagaagacatagagccatggtgtgtttggaactttcacagagggaagcctggggctcgggaagcccggaaaagaygccggcgcactgagggcttgtacaggtgccactgtgccgaaggtggctacgagggaggcaggtgtatgggtgagggtgagtgcagtgtggctggaggcttagggaaaggtgagtaggacggcgagagacccacggggaatgagggctggacctcagcctgagtgagtgtgtttggtggggtgagcagtgatgtcagtccctcctgggagctgctgtgatttggggctttctactttattcactcaacaaacgtttctcagaatggarggtgctcggggccgtaaggcacagatactgatgtkgcccttaaggtcacaaggtccaaggttcaatcccagtncancattatccagngtgcaattttgacatttgcgtaac

SEQ ID NO: 293 - DNA, 438 bp, Homo sapiens
  SITE (400): n equals a,t,g, or c
  SITE (408): n equals a,t,g, or c
  SITE (411): n equals a,t,g, or c
aattcggcacaggttggatggacaggaacacagggagaggccggaggggaaacaggggatttgggcaagagaggtaatgggtggaagggaccggacacctgggtcccagagggcatgcaggggaggtggagtctggggaaccgaatgcttgggtcctgggcgggtagctgtttgaaaggccagtacagtacagtacagattagtagtcttgggacctgggaggagggtgtcctgaggtgtgagytttgacctgtctgtcctagcagaagatgtaaaaggtgaccgggaryttygaccarggcctcgagatgagccacggtcccaatgggcgacgagaggaaaagacagagaagccccgtttcagttccatatcgccatggtggctttcacagtttggganattctcgnggnttctgctcctcaagggatctgctcatc

SEQ ID NO: 294 - DNA, 1270 bp, Homo sapiens
  SITE (1268): n equals a,t,g, or c
gctcgtgccgaattcgggacgagcgactttgcagatttctcttcccccaggcctccctcctccacctctccgccccctccgggcttggctctcccaggaggctacgactggagccactggtcccgcaggatccccgcgtcctcggtcgccgcgtccacgtccctctcgcgtccccgcccggcgccacgccgcctcctctgggttcggcctccgcgcggtgcagcgcagtctcaggccgcgggacaagcccgacttaaatctctgcaatggctaacgaagcttatccttgtccgtgtgacattggccacagacttgagtatggagggctaggccgtgaagttcaagtcgagcacatcaaggcttatgtcaccaaatcccccgttgatgcaggcaaagctgtgattgtcattcaagatatatttggctggcagttgcccaataccagatatatagctgacatgatctcaggaaatggatacacaaccattgttccagacttctttgtagggcaagagccttgggacccctctggcgactggtctatcttccctgagtggctgaaaacaagaaatgcccagaagatcgatagagagatcagtgctatcttgaagtatctgaaacaacagtgtcatgcccagaaaattggcatcgtgggattctgctggggtggaactgctgtccatcatttgatgatgaaatactcagaattcagggcaggggtgtccgtctatggcatygtcaaggattctgaagacatttacaatttaaagaaccccactttgttcatttttgctgaaaatgatgttgtgattccactcaaggrcgtatctttgctgactcagaagttgaaagaacactgcaaagttgaatatcaaattaaaacattttctgggcagactcatgggttcgtgcatcggaagagagaagattgctcacctgcagacaagccctacattgacgaggccagaaggaatttaattgagtggctgaacaagtacatgtagcaagaatcaagggcaagccttcctagaatagctttcatcccaaaatttgcttggaaatagttagatcatttgatttaattttcacttttataaaataagtgtaggaatcctaaaattgattatttcatttgaaacacaaattcagtaggacgtaatgcatgaaataatttaattttttgacatgtacatcgarttcataatttaaaaacaaggtctgaccaggtgtagtgcctcatggcctgtaattcccggcacttttggggngg

SEQ ID NO: 295 - DNA, 285 bp, Homo sapiens
ctttttcctgtgtccctgattattgtttaatagtgtttgtatactgacatgatacataatatccaccttctgcacccacagtgtccgcctttatgcttggacaagagcatgcagggtaggacatttctgagccttgcttttttccctggaagttttttgtttgtttgtttgttttttaagagacagggtctcttgctgtctcactcaggctagagtgcagtggtgtgttcatagctcactgcagcctcaaactcctgagtttcaagccatccctctttgcctcag

SEQ ID NO: 296 - DNA, 898 bp, Homo sapiens
  SITE (416): n equals a,t,g, or c
ggcacgaggtaactcacatacaggcccgattccacctacagcaaagctggatgcgatggctggcagaggcaaaccctttgcctgcactgcaggccaaagccgggatgtggcctagatggttcctaaggtccctgacaatcctgagatcttgcatcttgtctatttcaggtcaaaggtgcctacatgctccttctagctttgtttccctgatgytccttgccacctgctactcctctctgagctacttttccaggttccacagggagaggttcagctgtccgtggtagacatgagggtagagaatgaggtggttgggttccacttacctttctatcatcttgcagtatggatgtctcttgactggtaccgtgtagacttttgagggcacacaggagtctgcagagagatactggggnacattgagcagcagcagtggggttgggaggcagaaatgaggacaggaacatttaccttgtgtttctctcagcttctcagatgaccaagatggtgctgcagatggtgctgaggatggagaacccaccaagccccgctaggagccacctagactggatgcagagcatggttcagcgagttctccaaaccagcctcccaggaatgccattcwccatggctgtgaggagaataaagaagagagcctgactcctctcctgaggccccttccccaccctgagccagcaggatccacggagcagaggtcatctgtccccagcttggcccactgagggcagcatggctgggcccaggatgcttgtctctcagctcccatcctgtgtacttccacattggtttaaccagaggaaaaccgaaatctacaattgtcataaacacatttaaatgtgcgtagaatcagccatacaaattgtgaaacataaaaaaa

SEQ ID NO: 297 - DNA, 500 bp, Homo sapiens
gaccccggcctacagcagaccctccggggccagctccgcctgctggagaatgatagccgggagatggcccgcgtgcttggggaattatcagccaggctgctgtccatccacagtgaccaggaccggatcgtggtgacgtttaagacttttgaagaaatctggaagttttccacctaccatgctctcggcttcactcatcactgcctggcaaacctgctcatggaccaggccttctggctgctcttgcccagtgaggaggaggagacggccatccaagtccatgtggatgagaacgccttaaggctgacccacgagagcctcctcatccaagaagggcccttctttgtcctgtgtcctgaccaccatgtgagagtgatgacgggtccccgggatgcaggaaatggcccccaggccctcaggcaggcttcgggggcaccccagggagaggcggccccggaaacagactcttcaccgccgagccccagcgtgtcctccgagga

SEQ ID NO: 298 - DNA, 411 bp, Homo sapiens
  SITE (87): n equals a,t,g, or c
  SITE (401): n equals a,t,g, or c
ggcagagcggggtgcccatcccacaggtgtgccgcacagggacttcctgtctaggtaaaaggtcagactagaccttggaatctaganatcattattcggagtttctgaacagattaggagatgggtatcattcattcattcattcattcattgcaacacattttgtgcaaggcacaggttgaagcaaagcagagttggcgcctgcccacaggwgctgagacgcagtggacaaggtcagatattcacacattgacatgtgtcagccggactatgctgcaaaactgaggcttttggtgcagggagaccayttggtggcaatgcgggggacagaggkttagaccaggccaggaaatggagggcacctttctggaaacacaaccggttgagaatatcatgtcacntccagggttc

SEQ ID NO: 299 - DNA, 628 bp, Homo sapiens
  SITE (600): n equals a,t,g, or c
  SITE (607): n equals a,t,g, or c
  SITE (612): n equals a,t,g, or c
  SITE (623): n equals a,t,g, or c
gagtgaaaccctgtctcaaaaagaaaaaaaaagttgaccttgagaatttataatattctgagaaaactggaagcatgcataaagcccctctgctgtgcactgaagtatgggtgccttgaggaaaagcagttacacagttgagttgcaagctgaattggctgtgttcaaggcatgccctttagaattgaaagaactagcagattacggtatttagacttgaatatttggctgatattttctggaaattaatggaatgagcctctcacctcaagggaaacaactgatagtgttgccagtgataaagctttcaagcaaaaattggaatttccgaaaatctgtactccaccatgagctttattgttggggatattaacaaatgtgatttgtataatgaaatgcatttcatttggaagaattcaatgaaccatttttccaagtgaccagtacgtgatgttacaaaatcatgcatggctcaaagattgattcaaaagtgtaagacaggccagtggattttaatgtattaacaatataagagtgcattaagttttcggagtctacattgcctttaagaaactatgrcttgtagtaagccgggcccgntgggctncacgncctggtaaatncccca

SEQ ID NO: 300 - DNA, 604 bp, Homo sapiens
gcctctcccacggcggcggctctcggtcccccgctccgcgtctttcgggcatacagtgacctcgggcggcgggtcacgtcggccgggcatggctgcatggagcccggccgcggcagcgcctctcctccgcgggatccgcgggcttccacttcaccatcggatgtttgccactcagactgagggggagctcagagtgacccaaattctcaaagaaaagtttccacgagctacagctataaaagtcactgacatttcaggaggttgtggggcgatgtatgaaattaaaattgaatcagaagaatttaaggagaagagaactgtccagcagcaccagatggttaatcaggcactaaaagaagaaatcaaagagatgcatggattgcggatatttacctctgtccccaaacgctgaccacgccctggctgcatagatgctgctgcttaagaccttggatgaacttcactgacatcattcttccctaagcagtcaccaaaaaatttatatattttgctcatatacatttccatattataattatagaagatgtataatctatttagatgttaattaaaggaaacaaacaactgaagcttttgaagggtc

SEQ ID NO: 301 - DNA, 475 bp, Homo sapiens
agtggtaggaacaacgccccaraaggtagaatgtggtggggtgtgatggaacaggccagttggcctaagaattagtacttgctctaataatgggtttcatctattttcatgagttgcagcatctgcatatacaaggcctggatcactttaggatcaatattttgacacgggagaaggcagctcagaaaggattaaggaagatagctcaaagccaaagcagaccctccgtgtgaactttatactgctcacttccgtgtttcccaagtaaatggggaaactgtccaaccttgtcatgtgttgggacttactgcttgaggcaaagcattcatcctacatcataaaaaatctccaaagatctctttaagggctgggcatggtggctcactttgggagatggattgcttgagctcgggaagagaccagttcggtctctacaaaaaaatacaaacacaaatatacttttaaaaaaaaaaaa

SEQ ID NO: 302 - DNA, 1103 bp, Homo sapiens
  SITE (306): n equals a,t,g, or c
aaatatgcaggagctatggaatctgaaccctgtgtctgcactgaggctgattttgattgcgactatggttatgagcgacacagcaatggccagtgcctgccggcattttggttcaatccatcctctctgtcaaaggattgcagcttgggacagagttacctcaatagtactgggtacaggaaggtggtttccaataattgcactgatggcgtaagggaacagtacactgccaaaccgcagaagtgcccagggaaagccccgcgggggctgcgsgatagtcacggctgatggaaagctgacagcggnaacaaggacacaacgtcactctcatggtgcaattagaagagggtgatgttcagcggacactcatccaagtggactttggcgatggtatcgcggtgtcttacgtcaatctcagctccatggaagatgggatcaaacacgtctatcagaacgtgggcattttccgtgtgaccgtgcaggtggacaacagtctgggttctgacagcgccgtcctgtacttacatgtaacttgtcccttggagcacgtgcacctgtctcttccctttgtcaccacaaagaacaaagaggtcaatgcgacggcagtgctgtggcccagccaagtgggcaccctcacttatgtgtggtggtacggaaacaacacggagcctttgatcaccttggagggaagcatatccttcagatttacttcagaaggaatgaataccatcacagtgcaggtctcagctgggaatgccatcctacaagacacaaagaccatcgcagtatatgaggaattccggtctcttcgcttgtccttttctccaaacctggatgactacaacccggacatccctgagtggaggagggacatcggtcgagtcatcaaaaaatccctggtggaagccacaggggttccaggccagcacatcctggtggcggtgctccctggcttacccaccactgctgaactctttgtcctaccctatcaggatccagctggagaaaacaaaaggtcaactgatgacctggarcacatatcagaattgctgatccacacgctyaaccaaaactcagtacacttcgagctgaagccaggagtc

SEQ ID NO: 303 - DNA, 1115 bp, Homo sapiens
  SITE (21): n equals a,t,g, or c
tcgacccacgcgtccgcaagnaactgtcagcaacagaaaatgagatatgatgctagagagcatttgtccttgactgtaatacagaggcttaggggaagtgagacataagcttgtaggaataataaacgttctacaataaacgttttggctatcttaagccattgtatgggggggattaggaagtaggagggattgtcctacaacaggcccttatacttcaacagcccaaatattttggtttattcctttttatccataaagtctttattcttcaagtttgggtattatagattaccattgttagcctcccttaatgggaccatatgagccaggcttttaagacggactcattttgaattgagtttcaaactttgaaagtgcaaggatttaatttttaagttgaatcccatgaaaggtgtcatcatcactaggaataacaccctttgtaactacatatagaactgttacaatggtagcagaaaatcctattgrtttcatctcacccatttcagataccttcagtgaaattaagggtagtgtgatgtcccatgtwataacaggcttagaacatcaattccytgctgccatttatgtgcttttattcccccttcaaaaattttttattggatatatatatttttcagtattcagactctgaaatctgtcattacaatcaagtgcttgtcacagctgaaagatttctggtggcttaaagtttactagcagtaaatttatgatatggtacagttctttgtacagaaaggcaccattatgttagaataaatttccagaacttagtgggaagaatcaggttttaaccttgtgtgtctgttacttctgagtgcatttctataatataaatgttgatttgcgtcaacattataaaagagcacttctgtggctcatttaaaagaaaaaaaaggttaagtcttttaaattttggccttgtttccaaatcctgtcttccatgttgtttttctgcacttcctgaccactcttataaaaagctcacaaacctttgaagaaactggagtaggctgttatttcattaaggtttacaaattaaatgcttgatttttaatgtaaaaaaaaaaaaaaaaaaaaaaaaaaaaaaa

SEQ ID NO: 304 - DNA, 439 bp, Homo sapiens
ggcacgagccaagggcctgaaagggagggaaaggggagggtagcgggagggtagcaggtgagttcctagggctggaaggtttagcagcagcctggtgcagtgccctgtcatcaagacaaacccacggtcctmctgggtgcctaccaagcttggtttgtacaaaagcaaggtgggagtctatttttgtacatgagatacatcacacttacctgtgggccagtattgtgaagtgagtctgagttgtttacactgatgccttccctgcccaccacaaattgtgtacatagtcttcagatgataccacccactgtatagttctgctttcccagagaggaagaacttttagaaaccaaatgatcttaattgttattgcccaccctgggtttttccgggtaggaattcacagtaggatggttgttaagagagagtgttgggaacc

SEQ ID NO: 305 - DNA, 791 bp, Homo sapiens
  SITE (694): n equals a,t,g, or c
  SITE (764): n equals a,t,g, or c
  SITE (778): n equals a,t,g, or c
  SITE (788): n equals a,t,g, or c
  SITE (789): n equals a,t,g, or c
atcgccagctcgaaattaaccctcactaaagggaacaaaagctggagctccaccgcggtggcggccgctctagaactagtggatcccccgggctgcaggaattcggcacgagcggcacgagctcgtgccgaattcggcacgagtggagacgccgtgactttgaagtgtaacttcaagacagatgggcgcatgcgggagatcgtgtggtaccgggtgacggatggtggcaccatcaagcaaaagatcttcaccttcgacgccatgttctccaccaactactcacacatggagaactaccgcaagcgagaggacctggtgtaccagtccactgtgaggctgcccgaggtccggatctcagacaatggtccctatgagtgccatgtgggcatctacgaccgcgccaccagggagaaggtggtcctggcatcaggcaacatcttcctcaacgtcatggctcctcccacctccattgaagtggtggctgctgacacaccagcccccttcagccgctaccaagcccagaacttcacgctggtctgcatcgtgtctggaggaaaaccagcacccatgccaaccacagagaacataccagagacggtcgtgagccgtgagtttccccgctgggtccacagcgccgagcccacctacttcctgcgccacaagccgaccccgagcagtgacggcactgtggaantacgtgccctgstaactggaaccttaacccacagawcgacaacgaggccttttaacttgsaggtcaagcncccaatttttcaangcccatcagnnaa

SEQ ID NO: 306 - DNA, 328 bp, Homo sapiens
gatttattttggcagaacagacaaaaggacgtggaatgtactttctgctacagccwttacagtcaactagatttgagtgctgccgctggtaagttaattgaatagccaagttatgttgtccttacccaagtagacagtggaaaggaataatggcagaggccatgatgcgagtctggccacagccatgcatmccatctgtggtgatcttagtcctgagatcacctatgtcctaggccacgaactgaatcatgtactagtaccatatcatctgacttcgtagctttycaggggraaaagactaggagatccggacatgactaagtctgtg

SEQ ID NO: 307 - DNA, 837 bp, Homo sapiens
agctccatcgcccccccycaacaamaaaaaaagtttcccatacactggcctgccccaaaacccactaacaattttagcaaaacagtccaggccaaagaggaagcatttcatgttcaataagaaacccagccattccgcatggctggttcctgagtggctctggtgatactctccagccacctgctgacattsagaatctcagacctcgggactgctgttgcggtaccgtgtgtctgacacctgccagcagccctttgctatctgcgcgcaggatgggggtgactgcccagacattcccgctagataggctctgatttccggggcagcctttcagatgcggcagacatacaacacctgtactttagagttttaagggaaaaaaaaatcagaagtgctggttagatagtaaaaacttaggataacttagaaaggctagttttagcttcctttgtggctccctggtgcaaaacaattagcagttatgcaatggacctgattctagtttattctaattaagaagtgaggccgrgtttgacttcgttcctgaatacaatcttgagtaactgggaaagtctgagtgaaaggatggcctcattctctttctaatcttgctggtttcaagattagaaaatggcattatttgatctgaaatgtttgagaagacacgaataaagttacttgggcagacttggcttgctttctttcctttacacatacctgttattttcaaagcagaatatttttcatgaaaacacacccaatttaaagaacaagaataaaatgaagcaaggtgtcccccccccctatgccaggcaaaaaaaaaaaaaaaaaaaaaaa

SEQ ID NO: 308 - DNA, 1511 bp, Homo sapiens
  SITE (1511): n equals a,t,g, or c
ttggccggctttccccgtcaagctctaaatcgggggctccctttagggttccgatttagtgctttacggcacctcgaccccaaaaaacttgattagggtgatggttcacgtagtgggccatcgccctgatagacggtttttcgccctttgacgttggagtccacgttctttaatagtggactcttgttccaaactggaacaacactcaaccctatctcggtctattcttttgatttataagggattttgccgatttcggcctattggttaaaaaatgagctgatttaacaaaaatttaacgcgaattttaacaaaatattaacgcttacaatttgccattcgccattcaggctgcgcaactgttgggaagggcgatcggtgcgggcctcttcgctattacgccagctggcgaaagggggatgtgctgcaaggcgattaagttgggtaacgccagggttttcccagtcacgacgttgtaaaacgacggccagtgaattgtaatacgactcactatagggcgaattgggtaccgggccccccctcgagtcatcagccatgtgcctgaaaacacaaagggggcagtgaaaaaacacctaaaccaaaagaaaaaagagcaggaactgaccagcaaaatgccagcagttgctttatggtggagttcgtcattttggttgtgtaatgtaaagggtaacacacggcataaaatcggtcaatagcaatggaacagaggtggaaaatggaggtcagtctgagcatcatgtcaaagcttgtgtggaatttacaaaagccatccccaaagtaccagcaactctccactgatcgcattatgctgtatggcataatgacaaaacccagcagaaagtccgtggttgccatggagaggatcagaaagtttgtgggagagtgaagctgtttgaaatgcgatatggaaaccattataaccaagtttccgaatagtgataatcatggctccagtcataaccgaatacattatcacctggacatgaaaagagcggttggtgggaggacaggatttatttacaaattttggacaactggataggtcttcgggaatataagttagatccatggtgctttatcccttgaaatttctttccaggaggatgagtcactcgtgccgaattcctgcagcccgggggatccactagttctagagcggccgccaccgcggtggagctccagcttttgttccctttagtgagggttaatttcgagcttggcgtaatcatggtcatagctgtttcctgtgtgaaattgttatccgctcacaattccacacaacatacgagccggaagcataaagtgtaaagcctgsggtgcctaatgagtgagctaactcacattaattgcgttgcgctcactgcccgctttccagtcgggaaacctgtcgtgccagctgcattaatgaatcggccaacgcgcggggagaggcggkttgcgtattgggcgctcttccgcttcctcgctcactgactcgctgcgctcggccn

SEQ ID NO: 309 - DNA, 467 bp, Homo sapiens
gtgttggaacaccttcctcgaaattccaagtctgagactctagtctttagcatagtcccggcactggggtggcgacccgatccgagaaagagacccagcgcgtgagwcgctcctattgacaggtgtggcatttcttacatgggatcgtcagaaatttggcccaaaacggaactgacgcactgatctggggtgaccttcactcacatcggacacagtttgggtctctgggctaccgatgggctaccgccaattcttgaccttcagccgcagtgtggattcatgcggcggctctcaccacccgtgttgtcacctggaggctacctcgtgtctgcacccgacagcagagggggagctgtagcaggagtcttttataccctgtgctctatccccacttccgcccctggccccatggcggtcgcccatccccgcgactggctccacacctagtgtcaggttgtccccaggga

SEQ ID NO: 310 - DNA, 738 bp, Homo sapiens
  SITE (84): n equals a,t,g, or c
  SITE (696): n equals a,t,g, or c
tcgagtttttttttttttttttttttttttttttttttatgcataagaatacacataatgtatatttgtatgtgtatatactcntacataaacatatatgcataatataaatrtmcatatgtatgagaatgtttactatgtaacaaaattatatgatcacaaaacaagttatttcagaaagtgctcccaccaagcaagccactctgtgaattgccattgcctcctagtggctgctgcagttattacaggtgaaaatatctagctggaggcaaagggaggccttctgctggctggaaactgcccttaccaggactgaaaaagacatatttctgcacaaaattcacagcacccagcccaaagtctgaccagagtagtccccagggcatcagagtctaccatatcttcagaagactgacactcacctcggacctggaagaagagtgaggtgttggatgatccaagaacatttgtggcctcacagcggtagctgccagagtccccaaggcccagttctcggacctctaacttcagggagttggcctcagccttagcctggaaccgaccatgggatgggacctggggacccaggctggtggccaggargtgctccccatggaacaaggccagcaaggccagggggcggctgtccacagtgcagatgaacagagccatgtggccctggcccatgtctagganggctgacagctttggacggtccggggggatagagtacactca

SEQ ID NO: 311 - DNA, 1574 bp, Homo sapiens
  SITE (1283): n equals a,t,g, or c
  SITE (1348): n equals a,t,g, or c
  SITE (1544): n equals a,t,g, or c
  SITE (1546): n equals a,t,g, or c
ggcacgagcgaggactctggttcctacaacttccgcttcgagatcagtgaggtcaaccgctggtcagatgtgaaaggcaccttggtcacagtaacagaggagcccagggtgcccaccattgcctccccggtggagcttctcgagggcacagaggtggacttcaactgctccactccctacgtatgcctgcaggagcaggtcagactgcagtggcaaggccaggaccctgctcgctctgtcaccttcaacagccagaagtttgagcccaccggcgtcggccacctggagaccctccacatggccatgtcctggcaggaccacggccggatcctgcgctgccagctctccgtggccaatcacagggctcagagcgagattcacctccaagtgaagtatgcccccaagggtgtgaakatcctcctcagcccctcggggaggaacatccttccaggtgagctggtcacactcacctgccaggtgaacagcagctaccctgcagtcagttccattaagtggctcaaggatggggtacgcctccaaaccaagactggtgtgctgcacctgccccaggcagcctggagcgatgctggcgtctacacctgccaagctgagaacggcgtgggctctttggtctcaccccccatcagcctccacatcttcatggctgaggtccaggtgagcccagcaggtcccatcctggagaaccagacagtgacactagtctgcaacacacccaatgaggcacccagtgatctccgctacagctggtacaagaaccatgtcctgctggaggatgcccactcccataccctccggctgcacttggccactagggctgatactggcttctacttctgtgaggtgcagaacgtccatggcagcgagcgctcgggccctgtcagcgtggtagtcaaccacccgcctctcactccagtcctgacagccttcctggagacccaggcgggacttgtgggcatccttcactgctctgtggtcagtgagcccctggccacactggtgctgtcacatgggggtcatatcctggcctccacctcyggggacagtgatcacagyccacgcttcagtggtacctctggtcccaactccctgcgcctggagatccgagacctggaggaaactgacagtggggagtacaagtgctcagccaccaactcccttggaaatgcaacctccaccctggacttccatgccaatgccgcccgtctcctcatcagcccggcagccgaggtggtggaaggacaggcagtgacactgagctgcanaagcggcctaagccccacacctgatgcccgcttctcctggtacctgaatggagccctgcttcacnagggtcccggcagcagcctcctgctccccgcggcctccagcactgacgccggctcataccactgccgggcccgggacggccacagtgccagtggcccctcttcgccagctgttctcactgtgctctacccccctcgacaaccaacattcaccaccaggctggaccttgatgccgctggggccggggctggacggcnangcctccttttgtgccgtgtggacagcga

SEQ ID NO: 312 - DNA, 299 bp, Homo sapiens
  SITE (127): n equals a,t,g, or c
  SITE (144): n equals a,t,g, or c
  SITE (267): n equals a,t,g, or c
ggcagaggaagatgggatgcagcggaacctgaagatggagatgcttgccgggtgtggggctgggatgtgccaggtcgtggtgacctgtcccatggaaatgctcaagattcagctgcaggatgctggnacgcctggccgtccatncatgcagggctcggcctcagcaccctccacctccaggtcctacacaactggttcggcttccacccacaggcgcccctctgccaccctcattgcctgggagctgctccgcacttcaggggcctngctgggctcttacaggggcctgggtggccact

SEQ ID NO: 313 - DNA, 322 bp, Homo sapiens
  SITE (87): n equals a,t,g, or c
  SITE (105): n equals a,t,g, or c
  SITE (123): n equals a,t,g, or c
ttcagcacctcctggacgcggaggagggggtccttagtggccggctgctcccaggggacggtcctcagaagctcagccacgacatcntgcatctccaccagtgcnttgtggctgcccgacagnttctgctggaaggggttggcggcgcggggcgagcaggccaggtagtactgcaggatgtccccactcagcaccgagtactcctccaccattttggtcacgtaggcgtcagggtccacacagaagtcgctggagcccacggacacagccagctccaagcccagcgcgccccagctgatgaccagggccaggactcccagca

SEQ ID NO: 314 - DNA, 433 bp, Homo sapiens
  SITE (428): n equals a,t,g, or c
gagctcaactttccccgctctccccgcatccggaagcgctttctgctgcgacggatccttgagatgctgttcttcacccagctccaggtggggctgatccagcagtggatggtccccaccatccagaactccatgaagcccttcaaggacatggactactcacgcatcatcgagcgcctcctgaagctggcggtccccaatcacctcatctggctcatcttcttctactggctcttccactcctgcctgaatgccgtggctgagctcatgcagtttgggagaccgggagttctaccgggactggtgggaattccgagtytgttcacctaatttctgggcagaactgggaacatccctgtggcacaagtggtgcattcagacaatttttaaaagcccakgtttcgamgggggcagcagcaattgatggncagga

SEQ ID NO: 315 - DNA, 579 bp, Homo sapiens
  SITE (534): n equals a,t,g, or c
actggcttctacttctgtgaggtgcagaacgtccatggcagcgagcgctcgggccctgtcagcgtggtagtcaaccgtaagaggccagggtggggtggcactggacacatcagagcaggaccagatggtggagccccaaggaagggttggggtcctgggcatgggaacttcaaggccacttacctgraggtggccttgagctcatgtcccagctctgcacacctgggcaatgctttgacctccctagttccctcctattttatatttggaagtttaaacttatgaaaagttgcagagaaagacaaataatgattatatacctttaacctagatttcccatttattaacattttggcacatttgcttaatctttctcgctgtctacacagacacacacacgcacatacatacatataaagtatggatatagacttgccatatatacaggtggcacttgtgtgtatgcacatccactctatgtggacatggggcacttatacatatatggacactctatatacatatggcatagtnatttagtatctacctacatatttatatcctgaagttgtcagacag

SEQ ID NO: 316 - DNA, 370 bp, Homo sapiens
  SITE (4): n equals a,t,g, or c
  SITE (14): n equals a,t,g, or c
  SITE (107): n equals a,t,g, or c
cggnacgcgtgggnccgatactgcaatataaggatcaaatgagaaacacaagtacagctggccatccgtgtcagcaggttctgtaaccacaaataccgggggagggnagaccatacctgaaaatgctttacaaactaagttgtacgatagtctcaatgggttcaaaacaaatgaactgaaggacatcactgcccaacatgagatgtactkcaccttcaataacatcttcctctgatccactcagatctttcttatcttcagtctcaaagtcataggctctcgtaaactgatcttccacagacggcttcccagatttcctggaatacttttttccggagacaccatatttagatgcttcctgactttaaaa

SEQ ID NO: 317 - DNA, 553 bp, Homo sapiens
  SITE (553): n equals a,t,g, or c
aagctcgaaattaaccctcactaaaaggcagtttccagaccagctttcatgtgagatagcggtgattttcccgctctggtcggcaccgatacgcaagtgctgaagggtggcggggcggtgcgtggtgttattgggaatagaggggcgggggagcatcactttaaccggacgtttcaccgctcgggcggcgagggccgccagcagcgcatcgcttctcaggaacagcttgccgccaaaccctccgccgatatacggggagataatacgcacattctccacgggaactttcagcgtttttgccagatcggtgcggcaccagtcaatcatctgatttgaggtccagagggtaagcttatttccatcccagacggccatcgaggccaataccaccatcggtattccgggcacctttagcgcccgtttgcagccaaatgacacccgtgacgacgtgcaaagtatcgccgcgcaaatctacgaagggctttccttcgggttggcgatscgtgatcggcgttaacccgtgactgacgacgttgraaacytaagccgcgtn

SEQ ID NO: 318 - DNA, 463 bp, Homo sapiens
  SITE (210): n equals a,t,g, or c
ctatcttctattctcattcacttccagagaagtgtccttacccgaatgcaggtggacaagtagttaaacacagtggctttgagtgtgaaggcttctcctcgcaccacagaataaggaagggtgagttctaggaagaaaggctggaaggcttgaagagacacgataggagagaggccaaaccctgtggttccagacaagcagaatgcgctnggccttccactctgtgatggtttcagggacctggtcaccagctcacttatacctaatgagctagtgaaggagcagagaagaggagtataagcaaayctttttttttttttttttaacacaaagcatgggctgatcctagaacatgataactcagtaacctagtgtggtaaatgctaaacttgatctaagggttggtgctcctggtgaggtttaaagttttttttctccctacctccctttactccctccttcc

SEQ ID NO: 319 - DNA, 350 bp, Homo sapiens
  SITE (162): n equals a,t,g, or c
ccaatttgagtttcatctgctcagctgccagcagcagtgattccccaatgactttgggttggaaaaaagacaatgaactactgcatgatgctgaaatggaaaattatgcacacctccgggcccaaggtggcgaggtgatggagtataccaccatccttcggntgcgygaggtggaatttgccagtgaggggaaatatcagtgtgtcatctccaatcactttggttcatcctactctgtcaaagccaagcttacagtaaatatgcttccctcattcaccaaggacccccatggkatctcaccatccgagctggggscatggcacgcttgggggtgtgctgctkgtggggga

SEQ ID NO: 320 - DNA, 886 bp, Homo sapiens
  SITE (720): n equals a,t,g, or c
  SITE (806): n equals a,t,g, or c
  SITE (859): n equals a,t,g, or c
  SITE (870): n equals a,t,g, or c
  SITE (885): n equals a,t,g, or c
aattggcacgaggtgctttctctgggcttgacaaactgaggcgactgatactccaaggaaatcggatccgttctattactaaaaaagccttcactggtttggatgcattggagcatctagacctgagtgacaacgcaatcatgtctttacaaggcaatgcattttcacaaatgaagaaactgcaacaattgcatttaaatacatcaagccttttgtgcgattgccagctaaaatggctcccacagtgggtggcggaaaacaactttcagagctttgtaaatgccagttgtgcccatcctcagctgctaaaaggaagaagcatttttgctgttagcccagatggctttgtgtgtgatgattttcccaaaccccagatcacggttcagccagaaacacagtcggcaataaaaggttccaatttgagtttcatctgctcagctgccagcagcagtgattccccaatgactttkgcttggaaaaaagacaatgaactactgcatgatgctgaaatggaaaattatgcacacctccgggcccaaggtggcgaggtgatggagtataccaccatccttcggctgcgcgaggtggaatttgccagtgaggggaaatatcagtgtgtcatctccaatcactttggttcatcctactctgtcaaagccaagcttacagtaaatagtatgtgatctgacttttcctttarcatttaaagataccttttanaaatagaaagcacctgkttttctctyttaatcttaaccctgtcttttcttctcacagttcccacctgactcttcctttcctacctntcattccacaaaattaaaaatccttggttatttgtatctaaacctgcaatttntgtttaaaaanaaaaaccgttactcng

SEQ ID NO: 321 - DNA, 320 bp, Homo sapiens
  SITE (284): n equals a,t,g, or c
  SITE (303): n equals a,t,g, or c
  SITE (316): n equals a,t,g, or c
ccaaaattacaaaaagttatgaaaatttttatactgggaatgatgctcatataagaatacctttttaaactattttttaactttgttttatgcaaaaaagtatcttacgtaaattaatgatataaatcatgattattttatgtatttttataatgccagatttctttttatggaaaatgagttactaaagcattttaaataatacctgccttgtaccattttttaaatagaagttacttcattatattttgcacattatatttaataaaatgtgtcaatttggnggcccaggcccccattttntaccaataaccantttt

SEQ ID NO: 322 - DNA, 556 bp, Homo sapiens
  SITE (472): n equals a,t,g, or c
  SITE (478): n equals a,t,g, or c
  SITE (508): n equals a,t,g, or c
  SITE (514): n equals a,t,g, or c
  SITE (538): n equals a,t,g, or c
gcgctgcgctacgcggggctggacgacacggacagtgaggacgagctgcctccgggctgggaggagagarccaccaaggacggctgggtttactacgccaatcacaccgaggagaagactcagtgggaacatccaaaaactggaaaaagaaaacgagtggcaggagatttgccatacggatgggaacaagaaactgatgagaacggacaagtgttttttgttgaccatataaataaaagaaccacctacttggacccaagactggcgtttactgtggatgataatccgaccaagccaaccacccggcaaagatacgacggcagcaccactgccatggaaattctccagggccgggatwtcactggcaaagtggttgtggtcactggagctaattcaggaatagggttcgaaaccgccaagtcttttgcccttcatggtgcacatgtgatcttggcctgcaggaacatggaanggccantgaacaatgtcaccattttagaagaatggnttaaanccaggtgaacaatgacctggactngttttgttccgacgtgca

SEQ ID NO: 323 - DNA, 427 bp, Homo sapiens
  SITE (140): n equals a,t,g, or c
  SITE (143): n equals a,t,g, or c
  SITE (399): n equals a,t,g, or c
  SITE (427): n equals a,t,g, or c
ctcggcgcgccacgcggcccgccggccacgcgccctgggacaaccacgtctccggccacgccctgttcacagagacaccccatgacatgacagcacggacgggcgaggacgtggagatggcctgctccttccgcggcagnctnccccctcctactcgctggagatccagtggtggtatgtacggagccaccgggactggaccgacaagcaggcgtgggcctcgaaccaggtggtcaaggtggtgggcagcaacatctcccacaagctgcgcctgtcccgggtgaagcccacggacgaaggcacctacgagtgccgcgtcatcgacttcagcgacggcaaggcccggcaccacaaggtcaaggcttactgcgggtgcagccaggggagaatccgtctgcnttgcccgaagcccttccggcgggccgtn

SEQ ID NO: 324 - DNA, 367 bp, Homo sapiens
  SITE (258): n equals a,t,g, or c
tcgacccacgcgtccgcccacgcgtccgggacagaggcgagagcgaagaggaagcagctgcttctcttcacatcggtcatcctgggctccctggcgctgagcaggggtgcggtgcactcgtcggaacctaaagtctctgttgctgagaacagccccgccaagctgctctgctcctactccggcttctcctctccccgcgtggagtggaagtttgcccagggtgacatcaccagcctcgtctgctataacaacaagatnacagcttcctatgaggaccgagttaccttctcgcatagtggcatcatttccattctgtgacccggaaagactcgggcatgtacacgtgtatggtctccgacgaaagcgg

SEQ ID NO: 325 - DNA, 393 bp, Homo sapiens
  SITE (382): n equals a,t,g, or c
  SITE (385): n equals a,t,g, or c
gcttctttgggggtgaagagattggggaggaagtctccacccctgggaggcagaagccaggcatagcgcgctggctaggactccagtaccgtgaagggaggcagtgagagcaracatctgtgcctcattcctgatctcaaggggaaagcaagaacaaggatctcgaacctgcggaaggaggaccagtctgtgtacttctgccaagtccagctggacatacagatcagggaggctgtcgtggcagtccatcaaggggacccacctcaccatcacccaggccctcaggcagcccctccacagggcccctctcctgcctggacagctctgctggtctcccccgtcccctggagaagaacaaggccatgggtcggcccctgctgcngcncctgctgc

SEQ ID NO: 326 - DNA, 416 bp, Homo sapiens
  SITE (330): n equals a,t,g, or c
  SITE (400): n equals a,t,g, or c
cattcactcgctcttttcattcacgaaggtagtgaggcctagtggaaagccatggagagcgctctccccgccgccggcttcctgtactgggtcggcgcgggcaccgtggcctacctagccctgcgtatttcgtactcgctcttcacggccctccgggtctggggagtggggaatgaggcgggggtcggcccggggctcggagaatgggcagttgtcacaggtagtactgatggaattggaaaatcatatgcagaagagttagcaaagcatggmmtgaargttgtccttatcagcagatcaaaggrtaaacttgaccaggtttccagtgantaaaagaaaaattcaaagtggagacaagaaccattgctgttgactttgcatcagaagatatttatgaagncaataaaaccaggctt

SEQ ID NO: 327 - DNA, 539 bp, Homo sapiens
  SITE (12): n equals a,t,g, or c
  SITE (509): n equals a,t,g, or c
  SITE (527): n equals a,t,g, or c
  SITE (530): n equals a,t,g, or c
  SITE (537): n equals a,t,g, or c
ggggacccgaangcagctctcccaggctgcatgtggctgtggcccccaacacactgcgtctggagatccacggggctatgctggaggatgagggtgtctatatctgtgaggcctccaacaccctgggccaggcctcggcctcagctgacttcgacgctcaagctgtgaatgtgcaggtgtggcccggggctaccgtgcgggaggggcagctggtgaacctgacctgccttgtgtggaccactcamccggcccagctcacctacacatggtaccaggatgggcagcagcgcctggatgcccamtccatccccctgcccaacgtmamartcagggatgscamctcctaccgytgsggtktgggsccccctggtcgggcaccccgcctctccagacctatcaccttggacgtctctacgcgccccgcaacctgcgcctgacctacctcctggagagccatggcggcagctgccctggtactgtgcactgtggacaggcgccgcccgcccagntgccctaaccacgccggncgncttttgnct

SEQ ID NO: 328 - DNA, 520 bp, Homo sapiens
  SITE (448): n equals a,t,g, or c
  SITE (483): n equals a,t,g, or c
  SITE (503): n equals a,t,g, or c
gattccattgaaagctacatgcgaacctggatgtaagtttggtgagtgcgtgggaccaaacaaatgcagatgctttccaggatacaccgggaaaacctgcagtcaaggatacttgacaatgactggggacaattttggttgtcataactggatgtgggaggtactcccggcatctagtgaatggagcccagggatgccgctaaacatcctgcagtgcacaggacagtccccacaacaaataatgatttgtgtcaacggaagttaagaaaccctggcatgaagaaatcttcaataattcaaaaagggtccccagtcctataaggaagttgaacaaagagcagtaaatccaattcagctgcccttggagaatggagtttcagagaagactggacacccactycactctaccactyccagcccttgctgccaagcccagagccttccttgnccttgtggcaagcctgatcaaagtccacgtacatncattaatggtgacaggcctnagccttaactcatgtct

SEQ ID NO: 329 - DNA, 706 bp, Homo sapiens; identical to SEQ ID NO: 107

SEQ ID NO: 330 - DNA, 846 bp, Homo sapiens
  SITE (14): n equals a,t,g, or c
  SITE (18): n equals a,t,g, or c
  SITE (146): n equals a,t,g, or c
  SITE (697): n equals a,t,g, or c
  SITE (751): n equals a,t,g, or c
  SITE (766): n equals a,t,g, or c
aacaatggagatantaantatggtctaaagctgttttttcatagcttataacatgatcaaatactccttaacataaataaggtgaacaaatggaacttaaaaaattgatggaacatatttttattacacccgattacagacaagcntggaaagtggtgcataaattgtcagatattctactgttgactatttgtgccgttatttctggtgcagaaggttgggaagatatagaggatttcggggaaacacatcycgattttttgaagcaatatggtgattttraaaatggtattcctgttcacgataccattgccagagttgtatcctgtatctgtcctgcgaaatttcatgagagctttattaactggatgcttgactaccattcttcagatgataaagacgtcatcgcaattgaatggaaaaattacaccggcattcttatgacaagagtcgccgtaaggaaggcgattcatgtcattagtgcgttctcaacaatggcacagtctggtcatcggacagatcaagacggatwagraatccaatgagrtcacagctatccctgaacttyttaacatgctggatattaaaggaaaaatcatcaaaaccgatgcgatgggttgccagaaagatattgcagagaagatacaaaaacagggaggtgattatttattcgctgtaaaaggaaaccaggggcggntaaataaagccttcgaggaaaaatttccgctgaaagaattaaataatcccaagnatgacagttacgcanttagtgaaaagagtcacggcagagaagaaacccgcttcatattgcttgcgatgttcctgatgagcttattgatttcacgt

SEQ ID NO: 331 - DNA, 595 bp, Homo sapiens
  SITE (304): n equals a,t,g, or c
  SITE (321): n equals a,t,g, or c
  SITE (405): n equals a,t,g, or c
  SITE (524): n equals a,t,g, or c
  SITE (575): n equals a,t,g, or c
cttccatttaattttgtagatccaaatatggattcaagggagggagaagacaaagaactaaaaattgatttagaagtatttgaaatgcctcctcgctttataatgcctatttgtgattttaaaattccagaaaattcagatgctgtattcaaatgttcagtcatagggatcccgactcccgaagttaagtggtataaagaatatatgtgtattgagccagataatattaaatacgtgattagcgaggagaagggaagtcacactcttaaaattcgaaatgtctgtctttctgatagtgcacatnrcaggtgcagagctgtngaattgtgtaggagaggctatctgtcggggattcctcaccatgggagattctgaaatatttgctgtgatagcaaagaaaagcanagtgactttaagcagtttaatggaagaattggtcttaaagagcaactacacagacagtttttttgaatttcaggtggtggaagggcctcccaggtttatcaaaggtattttctgactgntatgcaccaataggtacagcagcatattttcagtgcttagtcgtggctctncaaaaccacggttactggtc

SEQ ID NO: 332 - DNA, 1765 bp, Homo sapiens
ggtccggaattcccgggtcgacccacgcgtccggattcggatgttcccgatgacaatagtgatgatttggaagttcctgtgccagcagaagatttgtgtaatgaaggccaaattgcttcagatgaagaagagctggttgaggctgctgctgctgtctcccagcatgattcatctgatgatgctggtgagcaggatcttggtgagaatctcagcaaaccaccaagtgatcctgaggctaaccctgaagtttcagagagaaagctgccaactgaggaagagcctgcacctgtggtggaacaatcagggaaaaggaagtcaaaaaccaaaactattgtggagccaccgaggaaaaggcagacaaagaccaaaaatatagtggagccaccaaggaaaaggcagacaaagaccaaaaatatagtggagccactgaggaagaggaaggcgaaaaccaaamtgyatctgtgacacctggacataagaagcgtgggccttcaaagaagaaacccggtgcagcaaaagttgaaaaacgcaagactaggactcctaaatgcaaagtccctggatgtttcttgcaagaccttgaaaagtcaaagaaatactctggaaaaaatttaaagcgaaataaggatgaattggttcagagaatctacgacctgtttaacagatccgtctgtgataaaaagctgccagagaaactacgcataggctggaataacaagatggtgaaaactgctggcttatgcagcactggtgagatgtggtacccaaagtggcggcgctttgccaagatccagattggcttgaaagtctgcgactctgcagaccgaatccgggataccttgatccatgaaatgtgccatgctgmctcctggctgattgatggtatccatgattctcatggtgacgcatggaagtattatgccaggaaatccamcaggatacacccggagctgcccagggtcacccgttgccataactataagattaactacaaggtccattatgaatgtactggatgcaaaacgaggattggctgctacaccaaatcgttggacaccagccgcttcatctgtgccaaatgcaaggggtctctggtcatggtgccattaactcagaaagatgggacccgtattgtgccccacgtgtgaccatttgctgtgtatgtgcagaagtattatagaaaaattatgcaggagatggctaggattagccttggggatgtgatgaaaacacttggcaggaattacaaggcaatgaagaattcttaaggttatcttagagtatattaatgtgagctatatcctttactggtaagaagttttagaaaagtttgttttgtgaagttaggaawattagaatttaggtactgytaagtaagtaatgttagaatttaagattcatgttattaacgatgattgaccttaaatagggactctattgctaaccattctgtgcccttgacagggtatttctgaagcccttgggatctaccttgggtcttacttgagttccatatttttcacatgtagaacaaaatgcaaaagaaaagtgagttttcaagagtggcaggttgagagaggagaatgctggaaagaggacaagtttgagaggcaacacttaaacactagggstactgtggcatytatgtagacaggaaagacmaacgtgtttcataaaattcgttgttgatggtattgattgaaactatytgagccatgtaatcaaaaaataaaagttttytgcatcttgaaaaaaaaaaaaaaaa

SEQ ID NO: 333 - DNA, 665 bp, Homo sapiens
  SITE (568): n equals a,t,g, or c
  SITE (624): n equals a,t,g, or c
gacctcatccaaaccctctgatttccttaacttggctaagaaaaagaggaagttctccgagtgactcaccactgtggttctactatgccttctgaccccgtcttggacttcaactgggagaatgtggagccatttgaacaggctcctcttctggagcatattttcttctgtcacttgtagaaaagctgtattggattgtgaggcaatgaaaacaaatgaattcccttctccatgtttggactcaaagactaaggtggttatgaagggtcaaaatgtatctatgttttgttcccataagaacaaatcactgcagatcacctattcattgtttcgacgtaagacacacctgggaacccaggatggaaaaggtgaacctgcgatttttaacctaagcatcacagaagcccatgaatcaggcccctacaaatgcaaagcccaagttaccagctgttcaaaatacagtcgtgacttcagcttcacgattgtcgacccggtgacttccccagtgctggaacattatggtcattcaaacagraacagaccgtacatwtaacattacattggcctnctcagtcaatggctcgctgcccattcaattacactttctttggaaaaccatgttgnccatatcaccagctatttccaagtttggacagggtggcctg

SEQ ID NO: 334 - DNA, 468 bp, Homo sapiens
  SITE (396): n equals a,t,g, or c
  SITE (412): n equals a,t,g, or c
  SITE (447): n equals a,t,g, or c
  SITE (461): n equals a,t,g, or c
gcaccctgccacccagtgctcacaccctctggccagtgcctgctatggcccgactgctcaggtctgcaacctgggagctgttcccctggagggcctactgctcccagaaggcaaagggagagctctgcagggacttcgtagaggctctgaaggccgtggtgggcggctcccacgtgtccactgccgcggtggtccgagagcagcacgggcgcgatgagtcggtgcacaggtgcgaacytcctgatgctgtggtgtggccccagaacgtggagcargtcagccggctggcagccctgtgctatcgccaaggtgtgcccatcatcccattygggcamcggcaacgggcttgaaggtggcgtctgtgctgtgcaagttacatggggttccttcgcccgnccccagatggttccancaaaatttggcaaaattgtggctggcttccccggnaaaaaaggcacttngggtttg

SEQ ID NO: 335 - DNA, 1001 bp, Homo sapiens
  SITE (2): n equals a,t,g, or c
  SITE (3): n equals a,t,g, or c
  SITE (11): n equals a,t,g, or c
  SITE (14): n equals a,t,g, or c
  SITE (28): n equals a,t,g, or c
  SITE (990): n equals a,t,g, or c
  SITE (993): n equals a,t,g, or c
  SITE (996): n equals a,t,g, or c
  SITE (1000): n equals a,t,g, or c
  SITE (1001): n equals a,t,g, or c
anncacggacncgnttgtggtttgtagnagacaggcctcaaattaatgggaaatacatattgcatgacaatggcaccttagtcattaaagaagcaacagcttatgacagaggaaactatatctgtaaggctcaaaatagtgttggtcatacactgattactgttccagtaatgattgtagcctaccctccccgaattacaaatcgtccacccaggagtattgtcaccaggacaggggcagcctttcagctccactgtgtgccttgggagtcccaagccagaaatcacgtgggagatgcctgaccactcccttctctcaacggcaagtaaagagaggacacatggaagtgagcagcttcacttacaaggtaccctagtcattcagaatccccaaacctccgattctgggatatacaaatgcacagcaaagaacccacttggtagtgattatgcagcaacgtatattcaagtaatctgacatgaaataataaagtcaacaacatctgggcagaatttattttttggaagaagtttaatcaaaggcagccataggcatgtaaatgaatttgaatacatttacagtattaaatttacaatgaacatgcaaaataaaaggacttgtaaataaatgcattatgaactgatgatactgatttatttaatggatctcaaaacaaacttttaacttaaggcacttttattttgccaacaaataacaataaacaaacattgaaacggttcactataaaataacaaatggctaatgtacctgaatttttcagtaaaaaaatgaacttctaataccagttgcctagtgtccacctcctatcaatgttacaagcatggcactcagaacagagacaatggaaaatattaaatctgcaatctttatgatgtaaatttaccatcctgatgtataaatattttgtggtttataaatttttttgcyaaaaccyacagaaaawaaaaaaaaaaaactcgagggggggcngcntancggnn

SEQ ID NO: 336 - DNA, 461 bp, Homo sapiens
ctgaaacctgccaaaattgaccacaagcagtattttagaaagcaagtgctccatgggaaagatttccaagtagattgcaaagcttccggctccccagtgccagagatatcttggagtttgcctgatggaaccatgatcaacaatgcaatgcaagccgatgacagtggccacaggactaggagatatacccttttcaacaatggaactttatacttcaacaaagttggggtagcggaggaaggagattatacttgctatgcccagaacaccctagggaaagatgaaatgaaggtccacttaacagttataacagctgctccccggataaggcagagtaacaaaaccaacaagagaatcaaagctggagacacagcttgtccttgactgtgaggtcactggggatcccaaaccaaaaatattttggttgctgccttccaatgacatgatttccttctccattg

SEQ ID NO: 337 - DNA, 986 bp, Homo sapiens
  SITE (960): n equals a,t,g, or c
gctcgtgccgctcgtgccgccgaaatcgtaggacttccgaaagcagcggtggcgtttgcttcactgcttggaagtgtgagtgcgcgaagatgcgaaaggtggttttgatcaccggggctagcagtggcattggcctggccctctgcaagcggctgctggcggaagatgatgagcttcatctgtgtttggcgtgcaggaacatgagcaaggcagaagctgtctgtgctgctctgctggcctctcaccccactgctgaggtcaccattgtccaggtggatgtcagcaacctgcagtcggtcttccgggcctccaaggaacttaagcaaaggtttcagagattagactgtatatatctaaatgctgggatcatgcctaatccacaactaaatatcaaagcacttttctttggcctcttttcaagctgaaggcctgctgacccagggtgataagatcactgctgatggacttcaggaggtgtttgagaccratgtctttggccattttatcctggtaaagaagctgtgggcttaataagctaatatttsgtgtgatagttyctgtaaagctctgggcacagggcattattatagttgagcagccagttaactgatttaatctcatgtttgagttttcttgattgcatttgccttgtttattgtgagcatggaatacttctggaagctttcctagtagatttttctttaataaatgtactaatagtttttgatttacagaattactgcaaagatagtacagagactttctgtatgccctacacccagtttcccctattattaacatttcgcattggtakgatgcatttgtcgaaatagatgaatcaattctgctacatkakkatkaackaaagtacacactttattcaggttctgtttttgcctaatgtcttttttcagttctaggatccccattcaaggatactacattacatttagcagtcanggctccctagggctctccttgggtga

SEQ ID NO: 338 - DNA, 1869 bp, Homo sapiens
ttttttttttgatctccttccatctttatttttatggactagtcagaacacagtgaaccagccagtgaggagtggaaggggttaatccgaacaatccaagggccaatgtgggaaatgtgaagttcaaggtcacacagtcattctgctgtcargaagagtgtcatragtcarggaaggaragaagtattttaatagtgccctgtgggattctttctctctctctctctttttaatgtactatgaatcacaacacagtcaytgagctatagcagacaggctctggaatttgcattgatgtgtgatctctggcagccgctacatattcaatggacaaagtccgatgcttcctacacagagaattctgctgggtcagctcgtggagtgtcagcaggaaaggccacccagggatgcctgtcttggttctcagtttctcatcagtgtgtactttcttcttggtgagaggaaacacacctggtccctgggcctctgcatatagcatcaggcagggtctgagggcccctgggattctcagaatagaaggctctgtcccttggacaaggccagctggtgttacttggctccacaagtgttgatgtttttcccatccacggcatcttccacgagggaaatgtggtaatcggtggacagggtgaagtgagagatacagcccacgagccctctcatatattgcctgttagtgtgcagagcaatttccttcattccacccacatacagagctccattgatgttaagctgccgcatcatgcctggggatttgcctgttctggctccatagtcatccacggttatctttcctgactggccatccctaacggccttaactcggtgccaccgaccatcgttgaaggagccattcaccatgatggatgccacaccactgcccaggttatagctgaacacgagggctccatcccgaaggcccaaggaaatgaagtcgctgttgggtctcatggggctgtctcccctccacagcaaaaggccatccttggcagttgttttaaacctcatgaacacatttgatcttgatcctgacaccctcttcaagatatctgggttgtcatacgtcaggtaactgcggccgataaactgcgggatctcaatggcttctatgatcgctttctggcagtgaagcccctcaaagcccaaggggcagtcacagtcatagccctccttcctgggccggcagctgcccccatgggcacaaggggctctcacacaggggtgggccgcattctccacattcacttccggargtgaagtcatgcttcacatggatggttcggtcattcaggatgatcttctggatgctcccgctgaaaggcttcaggacacccgagttcttcttcacatcatcataattggggactccgccaatgaaaatgtctgtgttgcacttaatctgtgtgaagcctccctctgccattccctccactatcttctgcttatccacctgtaagattccattctttgctgtgcgagatacacgaagctcgtgccagttgcccagggtgaggggatcttcactcctgaggacaccggtcccagagccacagtcaaagcggaactccacgtggccccctgccaagttgatggacaggaagtctttgctgcctgtgtcatagctgtacaggaggacaccatctcctgagtctggccgaaatgtgatctcaaattccatgaaggaaaggtaatgctggggctccagtggccagggagttgcagcgtaagatctcagagactctctgaactgaggaatggtcaaggtgaaagcatcttcacagtgtcgacctttaaacccaaggggacagaggcaaatgtaggagtcggctttgattgctgtgcaggtgc

SEQ ID NO: 339 - DNA, 321 bp, Homo sapiens
  SITE (260): n equals a,t,g, or c
  SITE (293): n equals a,t,g, or c
  SITE (320): n equals a,t,g, or c
ggcacgagctcacttctggagaaattgtttatcttctggagaagatagatacagattggtacagagggaactgtagaaaccagattggcatatttcctgccaactatgtcaaagtgattgtaagtgggttgtgtttgttttaatttggtcatatactcagtgggttctatgtgacttgtaggttggaaaaaataactagaaacccagattctagttctctttcattgattcatttggcatttggaaaattcaaaaataangtttggtcaactaggtggtggttaattattatnttatggggtgttaggaacttaatgccna

SEQ ID NO: 340 - DNA, 666 bp, Homo sapiens
  SITE (181): n equals a,t,g, or c
  SITE (407): n equals a,t,g, or c
  SITE (659): n equals a,t,g, or c
cctgcgcccgacccgagtgtgacacccgtagagactgcctggccaaactgatctatgcccggttgtttgactggctggtatcagtgatcaacagcagcatctgtccagacaccgactcgtgggaccactttcataggcctgctggatgtgtatggatttgaatcatttcctgacaacagtntggaacattgtgcatcaactacgccaatgagaagctgcagcagcattttgtggctcactacctaagggcccagcaggaggaatacgcagttgagggcctggagtggtcattcatcaactaccaggacaaccagccctgtttggatctcattgagggaagccccatcagcatctgctccctcataaatgaggtggggaggaatgccgcctcaatcgacccagcagcngcagcccagctccagacacgcattgagactgccctggaggcagcccctgcctgggccacaataagctcagccgggagcccagcttmattgtggtgcattatgcggggcctgtscggtaccacacagcaggcctggtggagaagaacaaggaccctatcccacctrasctgaccaggctcctgcagcaatcccaggaccccctgctcatggggctgtttcctactaaccccaaagagaagacccaggaggaancccctgg

SEQ ID NO: 341 - DNA, 326 bp, Homo sapiens
  SITE (322): n equals a,t,g, or c
gccaggggaactggacagcgcctcagggcgtcatctactccccggacttcccggacgagtacgggccggaccggaactgcagctgggccctgggccgccaggcgccgcgctggagctcaccttccgcctcttcgagctggccgacccgcgcgaccggctggagctgcgcacgcggcttcgggcagcctgctccgcgmcttcgatggcgcccgcccaccgccgtccgggccgctgcgcctgggcactgccgcgctgctgctcaccttccgaagcgacgcgcgcggccacgcgcaaggcttcgcgctcacctaccgcgggctgnagga

SEQ ID NO: 342 - DNA, 2031 bp, Homo sapiens
cccccgggctgcaggaattcggcacgaggacttccccagtgactctctcgcctcataaacacgtgtctggcttcagcagctccctgcggacctcctccaccggggacgccgggggaggctctcgaaggccacaccgcaagcccaccatcctgcgcaagatctcagcggcccagcagctctcagcctcggaggtggtcacccacctggggcagacggtggccctggccagcgggacactgagtgttcttctgcactgtgaggccatcggccacccaaggcctaccatcagctgggccaggaatggagaagaagttcagttcagtgacaggattcttctacagccagatgattccttacagatcttggcaccagtggaagcagatgtgggtttctacacttgcaatgccaccaatgccttgggatacgactctgtctccattgccgtcacattagcaggaaagccactagtgaaaacgtcacgaatgacagtgatcaacacggagaagcctgcagtcacagtcgatataggaagcaccatcaaaacagtgcagggagtgaatgtgacaatcaactgccaggttgcaggagtgcctgaagctgaagtcacttggttcaggaataaaagcaaactgggctccccgcaccatctgcacgaaggctccttgctgctcacaaacgtgtcctcctcggatcagggcctgtactcctgcagggcggccaatcttcatggagagctgactgagagcacccagctgctgatcctagatcccccccaagtccccacacagttggaagacatcagggccttgctcgctgccactggaccgaaccttccttcagtgctgacgtctcctctgggaacacagctggtcctggatcctgggaattctgctctccttggctgccccatcaaaggtcaccctgtccctaatatcacctggtttcatggtggtcagccaattgtcactgccacaggactgacgcatcacatcttggcagctggacagatccttcaagttgcaaaccttagcggtgggtctcaaggggaattcagctgccttgctcagaatgaggcaggggtgctcatgcagaaggcatctttagtgatccaagattactggtggtctgtggacagactggcaacctgctcagcctcctgtggtaaccggggggttcagcagccccgcttgaggtgcctgctgaacagcacggaggtcaaccctgcccactgcgcagggaaggttcgccctgcggtgcagcccatcgcgtgcaaccggagagactgcccttctcggtggatggtgacctcctggtctgcctgtacccggagctgtgggggaggtgtccagacccgcagggtgacctgtcaaaagctgaaagcctctgggatctccacccctgtgtccaatgacatgtgcacccaggtcgccaagcggcctgtggacacccaggcctgtaaccagcagctgtgtgtggagtgggccttctccagctggggccagtgcaatgggccttgcgtcgggcctcacctagctgtgcaacacagacaagtcttctgccagacacgggatggcatcaccttaccatcagagcagtgcagtgctcttccgaggcctgtgagcacccagaactgctggtcagaggcctgcagtgtacactggagagtcagcctgtggaccctgtgcacagctacctgtggcaactacggcttccagtcccggcgtgtggagtgtgtgcatgcccgcaccaacaaggcagtgcctgagcacctgtgctcctgggggccccggcctgccaactggcagcgctgcaacatcaccccatgtgaaaacatggagtgcagagacaccaccaggtactgcgagaaggtgaaacagctgaaactctgccaactcagccagtttaaatctcgctgctgtggaacttgtggcaaagcgtgaagatagggtgtggggaaaaactctaccctggccacacgaaggactcacgcaaccacctcggacagaacctaagctttcttcattttattta

SEQ ID NO: 343 - DNA, 351 bp, Homo sapiens
tagaaacccacatttgcttccactggtgccaagatctgtaasgaawcwtmtggctgtagaagaatcctgtcactgaactgaacttcttctccattcctggcccagctgatggtaggccttgggtggccgatggcctcacagtgcagaagaacactcagtgtcccgctggccagggccaccgtctgccccaggtgggtgaccacctccgaggctgagagctgctgggccgctgagatcttgcgcaggatggtgggcttgcggtgtggccttcgagagcctcccccggcgtccccggtggaggaggtccgcagggagctgctgaagccagacacgtgtttatgaggcgagaga

SEQ ID NO: 344 - DNA, 447 bp, Homo sapiens
  SITE (398): n equals a,t,g, or c
  SITE (425): n equals a,t,g, or c
  SITE (447): n equals a,t,g, or c
gggcagacagaagaatgtggagtggatcgaggggatgtcgggaggacctcccagggtggcccctgcatagtgggacttgagactggacaaggagcagcccccagtggttaggactgaggagggggatgggatttttctccaaggaaacacccttctcaagtactcttgtccctgcccaggagacacccaggtcctttgaatgcacctgcccgcgtgggttctacgggctgcggtgtgaggtgagcggggtgacatgtgcagatggaccctgcttcaacggcggcttgtgtgtcgggggtgcagaccctgactctgcctacatctgccactgcccacccggtttccaaggctccaactgtgagaagagggtggaccggtgcagcctgcagccatgccgnaatggtgaaggctggagcctgaacggngagggatggggttgggggtctn

SEQ ID NO: 345 - DNA, 559 bp, Homo sapiens
ctggagccgccggcctccgaccccgagctgcagcccgccgagcgcccgctgccatcgccggggtccggggagggcgccccggtcttcctcacggggcctcgatcccagtgggtgctgcggggggcggaggtggtgctgacgtgccgggcggggggcctccccgagcccacactgtactgggagaaggacgggatggccctggacgaagtgtgggacagcagccacttcgcgctccagccgggccgcgccgaggacggccccggcgcgagcctggcaytgcgcatcctggcggctcggctgccggattccggcgtctacgtgtgccacgcccgcaacgcgccacggccacgcgcaggcggggcgctgctccaggtgcaccagccccccgagagcccgcccgcggaccccgacgaaggcccccgcgccggtggtggagcgctcaagtgcgcgcctaagaccttctgggtgaacgagggcaagcacagccaagttccgctgctacgtgatgggcaagcccgagcccgagatcgaatggcactgggagggccgcccgctgctt

SEQ ID NO: 346 - DNA, 573 bp, Homo sapiens
  SITE (449): n equals a,t,g, or c
  SITE (484): n equals a,t,g, or c
  SITE (557): n equals a,t,g, or c
gggccgcctccccggcacgaataccacttcagggtggtggccaagaatgagctgggggccagcaaaccctcggacaccagccagccctggtgcatcccccggcagcgcgacaggttcacagtgaaggctccgtgctaccgggagcccgacctgagccagaagccccggttcctggtgggcctgcggtcccactgctgccccagggctgcgagtgctgcatgagctgtgccgtgcagggctcgccccggccccacgtcacctggttcaagaatgaccgcagcctggaaggaaaccccgcggtgtacagcactgacctgctgggcgtgtgctccctcaccatccccarcgtatccccgaagracagcggggartacaaggctgtggctgagaacacgctgggccaggcagtcagcactgccaccctcattgtcatagaacccagcacctancctcacctcaccctgggatggtcctggacccttgnaagcttcacttccgacacctgcactggcccgggaagccaatcccaaggatggaagctgtgcccagagccccangaaaatgggagtgaga

SEQ ID NO: 347 - DNA, 293 bp, Homo sapiens
  SITE (223): n equals a,t,g, or c
  SITE (285): n equals a,t,g, or c
tattatttttgcgggaggtgataagtggtcagtggatcctcgagtttcaatttcaacattgaataaaagggactacagcctccagatacagaatgtagatgtgacagatgatggcccatacacgtgttctgttcagactcaacatacacccagaacaatgcaggtgcatctgaactgtgcaagttcctcctaagatatatgacattctgcaaatggatgatgnaccgtgcaatgsaaggkaaccaacgtgcactcttgacttgttttgggccactggggaaaccntagacctt

SEQ ID NO: 348 - DNA, 913 bp, Homo sapiens
  SITE (5): n equals a,t,g, or c
  SITE (912): n equals a,t,g, or c
gtacngattcccggtcgacccacgcgtccgacatggagctgttcctcgcgggccgccgggtgctggtcaccggggcaggcaaaggtatagggcgcggcacggtccaggcgctgcacgcgacgggcgcgcgggtggtggctgtgagccggactcaggcggatcttgacagccttgtccgcgagtgcccggggatagaacccgtgtgcgtggacctgggtgactgggaggccaccgagcgggcgctgggcagcgtgggccccgtggacctgctggtgaacaacgccgctgtcgccctgctgcagcccttcctggaggtcaccaaggaggcctttgacagatcctttgaggtgaacctgcgtgcggtcatccaggtgtcrcagattgtggccaggggcttaatagcccggggagtcccaggggccatcgtgaatgtctccagccagtgctcccagcgggcagtaactaaccatagcgtctactgctccaccaagggtgccctggacatgctgaccaaggtgatggccctagagctcgggccccacaagatccgagtgaatgcagtaaaccccacagtggtgatgacgtccatgggccaggccacctggagtgacccccacaaggccaagactatgctgaaccgaatcccacttggcaagtttgctgaggtagagcacgtggtgaacgccatcctctttctgctgagtgaccgaagtggcatgaccacgggttccactttgccggtggaagggggcttctgggcctgctgagctccctccacacacctcaagccccatgccgtgctcatcctacccccaatccctccaataaacctgattctgctgcccaaaaaaaaaaaaaaaaaaaaaaaaaaaaaaaaaaaaaaaaaaaaaaaaaaaaaaaaaaaaaaaaaana

SEQ ID NO: 349 - DNA, 612 bp, Homo sapiens
cgctctagaactagtggatcccccgggctgcaggaattcggcacgagcaccatccagaaccgagcagatctcgtgataaatgaagtgatgtggtgggaccatggagtgtattactgcaccattgaggctccaggggacacatcaggagaccccgataaggaagtaaagctcatcgtcctacactggctgacagtgatcttcatcatcctgggagccctcctcctcctgctgctgattggagtgtgctggtgccagtgctgtcctcagtattgctgctgctatatccgctgtccctgctgtcctgcccactgctgctgtcctgaggaagccctggcccgccaccgctacatgaagcaggcccaggccctaggtcctcagatgatgggaaaacccctgtactggggggcggacaggagctcccaggyttcatcttatccaatgcacccgctgctgcagcgagatttgtccctgccgtccagcctcccgcagatgccaatgacccagaccaccaatcascctyccatcgccaatggtgtcctggagtatttggagaaagaactgcggaacctcaacctggcccagcctctgccccctgacctcaaaggcagattc

SEQ ID NO: 350 - DNA, 335 bp, Homo sapiens
  SITE (219): n equals a,t,g, or c
  SITE (331): n equals a,t,g, or c
ttcagagggacggaatgtggtaagataatgatcwactgtagagccaggatccaggaaaggcagcataagtccacaattttagggctcatgagattggtgtatcttagagggtggtaatggcagtgtagcggtcataagccataacagccaaaagaagcatcagagccagcagtgatgtmwgaagaaawttgtgtggcacaacagccatagaatggactngctgcagacaggtagtkgaggcacttgggtacggtggtgcagatgagcatgagtcatgaggaagtgstgagaggaggtcatgggtttgggctggtgtcagtagatgagagancata

SEQ ID NO: 351 - DNA, 824 bp, Homo sapiens
  SITE (5): n equals a,t,g, or c
  SITE (6): n equals a,t,g, or c
  SITE (15): n equals a,t,g, or c
  SITE (19): n equals a,t,g, or c
  SITE (25): n equals a,t,g, or c
  SITE (110): n equals a,t,g, or c
cctcnnggacctcangctnatctgnaccaccgtacccargatggccttcaactacctgtctggcagcaagtccatttctatggctggttgtgccacacaaattttcttcnatacatcactgcttggctctgaatgctttcttttggctgttatggcttatgaccgctacactgccatttgccaccctctaagatacaccaatctcatgagccctaaaatttgtggacttatgactgccttttcctggatcctgggctctacagatggaatcatttatgctgtagccacattttccttctcctactgtgggtctcgggaaatagcccacttcttctgtgagttaccttccctactaatcctctcatgcaatgacacatcaatatttgaaaaggttattttcatttgctctatagtaatgcttgttttccctgttgcaatcatcattgcttcctatgctggagttattctggctgtcattcacatgggatctggagagggtcgtcgcaaagctttcacgacctgttcctctcacctcatggtggtgggaatgttctatggagcaggtttgttcatgtacatacagcccacatctgatcgctccccaacgcaggacaagctggtgtctgtattctacaccatcctcactcccatgctgaatcccctcatctacagcctccgcaacaaggaagtgaccagagcattcatgaagatctcaggaaagggcaagtctggagagagagttacctcataaactttatgttttgatgtctgctaaattattctcttctaatatccatcaagcttatcgataccgtcgacctcga

SEQ ID NO: 352 - DNA, 963 bp, Homo sapiens
  SITE (868): n equals a,t,g, or c
  SITE (944): n equals a,t,g, or c
  SITE (962): n equals a,t,g, or c
gggatggtcacgtgtctcctgccgctgcactgagggcttccggctggcagcagacgggcgcagttgcgaggacccctgtgcccaggctccgtgcgagcagcagtgtgagcccggtgggccacaaggctacagctgccactgtcgcctgggtttccggccagcggaggatgatccgcaccgctgtgtggacacagatgagtgccagattgccggtgtgtgccagcagatgtgtgtcaactacgttggtggcttcgagtgttattgtagcgagggacatgagctggargctgatggcatcagctgcagccctgcaggggccatgggtgcccaggcttcccaggacctcggagatgagttgctggatgacggggaggatgaggaagatgaagacgaggcctggaaggcyttcaacggtggctggacggagatgcctgggatcctgtggatggagcctacgcagccgcctgactttgccctggcctatagaccgagcttcccagaggacagagagccacagataccctaccactcctcagtgctctccgtcacccggcctgtggtggtctctgccacgcgtcccacactgccttctgcccaccagcctcctgtgatccttgccacacaaccagttttgtcccgtgaccaccagatccccgtgatcgcagccaaytwtccagatytgccttytgcctaccaacccggtattctctctgtctctcattcagcacagcctcctgcccaccagccccctatgatctcaaccaaatatccggagctcttccctgcccaccagtcccccatgtttccagacacccggcctgtggtggtctctgccacgcgtcccacactgccttctgccaacgtgtgnctttttggtggtcctgcttgcactgggcatcgtggactgtacccgctgtggcccccatgcacccaacaagcgcatnactgactgctatcgctgng

SEQ ID NO: 353 - DNA, 565 bp, Homo sapiens
  SITE (493): n equals a,t,g, or c
  SITE (538): n equals a,t,g, or c
  SITE (560): n equals a,t,g, or c
  SITE (564): n equals a,t,g, or c
gaacgaatgcatcccccacaatggctgtcgccacggcacctgcagcactccctggcaatgtacttgtgatgagggctggggaggcctgttttgtgaccaagatctcaactactgcacccaccactccccatgcaagaatggggcaacgtgctccaacagtgggcagcgaagctacacctgcacctgtcgcccaggctacactggtgtggactgtgagctggagctcagcgagtgtgacagcaacccctgtcgcaatggaggcagctgtaaggaccaggaggatggstacmactgcctgtgtcctccgggctactatggcctgcattgtgaacacagcaccttgagctgcgccgactccccctgcttcaatgggggctcctgccgggagcgcaaccagggggccaactatgcttgtgaatgtccccccaacttcaccggctccaactgcgagaagaaagtggacaggtgcaccagcaacccctgtgccaacggnggacagtgcctgaaccgaggtccaagccgcatgtgccgctgccgnctggattcacggcacctactgngaant

SEQ ID NO: 354 - DNA, 992 bp, Homo sapiens
  SITE (408): n equals a,t,g, or c
ggcacgagcttgcatgttggtgtttgcagtcacatggaatacccctgccgcttccagaatgcttctgccaccacccaggagatcattcctcatcgggtctttgcccctgtgtgcctcacgggtgcctgccaagagacccttctgcggctgatccctccttgcctctcagcagcacattctgttctgggagcacacccgttctctcggctggatgttctcatcgtccctgccaactttccaagtctggggatggccagcccacacatcatgttcctctctcagagcatcttgacaggagggaaccatctctgtgggacccgcctctgccatgaaattgcccatgcctggtttggcctagccatcggggcccgagactggacggaggagtggctgagtgaaggcttcgcnactcacttggaggatgtgttttgggccacagcacagcagctggccccctatgaggcccgggagcagcaggagctgagggcttgtctgcgctggcgtcgcytccaggacgagatgcaatgctcccmcgaggagatgcaggtgttaaggtttccacatgttggcggatgcagtggaagcttctcttgagatgtttgccacactgttcaacatgtttgaccactctgtcctaaaaacgctttcttcttaaagcactttctcctcctggcttctgtgtgtcttactctccttgagttccctctgcctctgtggccagtccttcctcacctctcttgctggcaggttaacagtctccacttcaatagcccaaggctcagaaagactgagtaatgcgtctaacctcctctagctgataaagaascaaggctcagaaagactgaataacgtgtctaacctcctctagctgataaagaagagaacagggatttaaacccagggacggaaactcttctcggttccctataccatattcctgtcttcagggaactgagagcatttagttgcattaaaacaaaaaaaaaaaaaaa

SEQ ID NO: 355 - DNA, 786 bp, Homo sapiens
  SITE (458): n equals a,t,g, or c
  SITE (735): n equals a,t,g, or c
  SITE (740): n equals a,t,g, or c
  SITE (762): n equals a,t,g, or c
  SITE (774): n equals a,t,g, or c
taatacgactcactatagggaaagctggtacgcctgcaggtaccggtccggaattcccgggtcgacccacgcgtccgcctcaacattcctcattattgaccctctcttgggacttttgaagattcaagaaacacaagatctggatgctggcgattatacctgtgtagccatcaatgaggctggaagagcaactggcaagataactctggatgttggctcacctccagttttcatacaagaacctgctgatgtgtctatggaaattggctcaaatgtgacattaccttgctatgttcagggttatccagaaccaacaatcaaatggcgaagattagacaacatgccaattttctcaagacctttttcagttagttccatcagccaactaagaacaggagctctctttattttaagtaggttgaaggaaatatattttgtacgaatatgtacttttatgntatatatttatgctttatacataggtattgctatttaaaatagtatattaatcttgccaacacattttatgttcattgcattttactttgaaatagtactggcattttatattcgggaattgtcataaatgagttatattttattcaaatgtatgtcattaatttatcataagggcttatgaaacaatatgacttcttcatatcttaccatttcttattgcaaatagagtcatctgagcctttacatagataagtggcacattaccttgattcttgnaacanttgctgtatagaaagataaaanattactattagntaactctattta

SEQ ID NO: 356 - DNA, 612 bp, Homo sapiens
  SITE (562): n equals a,t,g, or c
  SITE (606): n equals a,t,g, or c
ggcagagctggacaagcccttttytcttctcacgtcccacctcgatgcactgccctgggagggggccccaagaccttagactggatgcctttgctgggccatgctattctmagacctcccgccttcacccccagggccccaratcgtgtcacatccatatgaacacttggaatgtgaacagggcaggatgtgaatctttggctgtgaaagtgtttgcctaccccatggcctccatcgagtggaggaaggatggcttggacatccagctgccaggggatgacccccacatctctgtgcagtttaggggtggaccccagaggtttgaggtgactggctggctgcagatccaggctgtgcgtcccagtgatgagggcacttaccgctgccttgcccgcaatgccctgggtcaagtggaggcccctgctagcttgacagtgctcacacctgaccagctgaactctacargcatcccccagctgcgatcactaaamctggttcctgargaggaggctgagagtkaagagaatgacgattactactwagtccagaactctgggcccanggggttgggtaaccggctataatgttcatcctggtcttgaaaanaccttg

SEQ ID NO: 357 - DNA, 697 bp, Homo sapiens
  SITE (74): n equals a,t,g, or c
  SITE (647): n equals a,t,g, or c
  SITE (656): n equals a,t,g, or c
  SITE (666): n equals a,t,g, or c
cagaggtgctggtggcgcggggagtgcgcgtcaaggtgaacgaggcctaccggttccgcgtggcactgcctgcntacccagcgtcgctcaccgacgtctccctggcgctgagcgagctgcgccccaacgactcaggtatctatcgctgtgaggtccagcacggcatcgatgacagcagcgacgctgtgggaggtcaaggtcaaaggggtcgtctttytctaccgagagggctctgccgctatgctttctccttttctggggcccaggaggcctgtgcccgcattggagcccacatcgccaccccggagcagctctatgccgcctaccttgggggctatgagcaatgtgatgctggctggctgtcggatcagaccgtgagtatcccatccagaccccacgagaggcctgttacggagacatggatggcttccccggggtccggaactatggtgtggtggacccggatgacctctatgatgtgtactgttatgctgaagacctaaatggagaactgttcctgggtgaccctccagagaagctgacattggaggaagcacgggcgtactgccaggagcggggtgcagagattgccascacgggccaactgtatgcagcctgggatggtggcctggaccactgcagcccanggtggctanctgatggcantgtgcgctamcccatcgtcamamccagccag

SEQ ID NO: 358 - DNA, 516 bp, Homo sapiens
  SITE (512): n equals a,t,g, or c
cgcccgagcgccggagccccggccccgccccgcgagcgccgagacttgttggccgcggagactgcgaccctcttctctcagtctgccttactaccatgccgctctacgagggcctggggagcggcggggagaagacggcggtcgtgatcgacctgggagaggcctttaccaagtgtggatttgctggagaaactggtccaagatgtataattcctagtgtgataaaaagagctgggatgcctaagcctgtcagagttgttcagtataatatcaatacagaagaattatattcctacctaaaggaattcatccacatactatatttcaggcatctattggtgaatcccagagaccgccgagttgtgattatcgaatcggtattatgtccttctcacttcagagagacactcactcgtgttcttttcaaatattttgaggttccatctgtctttatatcaaataagtaaattgcttttgaaataaaaagagaagcaataaaattcttaccaaanaaaa

SEQ ID NO: 359 - DNA, 311 bp, Homo sapiens
  SITE (303): n equals a,t,g, or c
ggcacgagtgatttttgccagtgacacttcagccaccacggtgtattcgctaaaggttgaacagcccatgtagtggaagattggctggccgttgtaagaaaaacgcgttgtcctatcaggcataacccctttgccctgcgtggcgcgaacggcgacamacagattggttttacctgatttacagaacaggcattcgccacattctgcagtgtaaagcggaataacgtgatcgcctggcacaacgctggtcacaacttygcccacttctaccactatgccggcaccttcgtgtcccagcacggntcgtgccg

SEQ ID NO: 360 - DNA, 523 bp, Homo sapiens
  SITE (394): n equals a,t,g, or c
  SITE (417): n equals a,t,g, or c
  SITE (425): n equals a,t,g, or c
  SITE (495): n equals a,t,g, or c
  SITE (508): n equals a,t,g, or c
gaggaggggcaggagggagcctggactttggaggatggggaaggcaggccagggcccggagtgggtgaagacttctcaggactaggccaggacagtgcccatccctgcagaagcccagtggccaattgaggcaggaggagctccagacaacagcatgtgaggcaggcgtggattttgtgtacaagacaaagctggaatctgtggaggtctctgcctccaacccttacgtctattacaacacgcagctcgaagacatcattaagagtggtacggaccctgccacacccctggccatgaagaaattcgtctcccatgccamttgccatgactccctggggttkgcaagaacaggaatcgtacctccatccatgggccagaagtcagaactgtgganaatcaatcttgattacagctatnttcttggnaaggaaacttccccctccctttgggcagcaaatggaaatgccagcagaaaaattgggggacaatggaganttttgggattttncgaccccggtgcatc

SEQ ID NO: 361 - DNA, 699 bp, Homo sapiens
ggcacgaggaggggctggctctggtagattgcaaatgacctgctttttttctgatcccgagctgcgttcggacccytgtcggatagtaaatcccagtaaggtacctgccgtgggcagatctgagctttcttcttggacaccccatacccacagtcctccaggccacccttaagtacaatgttctcctacctaagaaggcatctggattttctctttccttggaaatagtaaagaactactctttgactgtttttgacctcacagtgaacctcaaatacactggaattcgcaataaatccagtatggtggttatagatgtaaaaatgctatcaggatttactccaaccatgtcatccattgaagagcttgaaaacaagggccaagtgatgaagactgaagtcaagaatgaccatgttcttttctacttggaaaatgtttttggtcgagcagacagtttcactttttctgctgagcagagcaaccttgtgttcaacattcagccagccccaggcatggtctacgattagtacgaaaaaggtggagaagcatttcttttaacaaactgattcttctgtatcaaacctggaaaaaaatcatgaaccatctgacatcgtgaacagtctgcagtgggctatggtttcttgacaagtcttatttccttatcatcccattaaatgttgtcattttgaaaaaaaaaaa

SEQ ID NO: 362 - DNA, 1140 bp, Homo sapiens
  SITE (1018): n equals a,t,g, or c
  SITE (1119): n equals a,t,g, or c
gaatctgtctccctggagctcccagtggacattgttcctgactcgaccaaggcttatgttacggttctgggagacattatgggcacagccctgcagaacctggatggtctggtgcagatgcccagtggctgtggcgagcagaacatggtcttgtttgctcccatcatctatgtcttgcagtacctggagaaggcagggctgctgacggaggagatcaggtctcgggcagtgggtttcctggaaatagggtacsagaaggagctgatgtacaaacacagcaatggctcatacagtgcctttggggagcgagatggaaatggaaacacatggctgacagcgtttgtcacaaaatgctttggccaagctcagaaattcatcttcattgatcccaagaacatccaggatgctctcaagtggatggcargaaaccagctccccagtggctgctatgccaacgtrggaaatctccttcacacagctatgaagggtggtgttgatgatgargtctccttgactgcgtatgtcacagctgcattgctggagatgggaaaggatgtagatgacccaatggtgagtcagggtctacggtgtctcaagaattcggccacctccacgaccaacctctacacacaggccctgttggcttacattttctccctggctggggaaatggacatcagaaacattctccttaaacagttagatcaacaggctatcatctcaggagaatccatttactggagccagaaacctactccatcatcgaacgccagcccttggtctgagcctgcggytgtagatgtggaactcacagcatatgcattgttggcccagcttaccaagcccagcctgactcaaaaggagatagcgaggccactagcatagtggyttgggtggccaagcaacgcaatgcatwtgggggcttctcttytaytcaggatactgtagktgstctccaagctcttgccaaatatgccactaccggctacgtgccatctgaggagatcaacctggttgnaaaatccactgagaatttccagcgcacattcaacatacagtcagttaacagattggtatttcagcaggataccctgcccaatgtccctggaatgtacacgntggaggcctcagccaaggctt

SEQ ID NO: 363 - DNA, 1171 bp, Homo sapiens
  SITE (1053): n equals a,t,g, or c
  SITE (1101): n equals a,t,g, or c
  SITE (1121): n equals a,t,g, or c
attatcctgactcatatccaccaaacaaggagtgtatctacattttggaagctgctccacgtcaaagaatagagttgacctttgatgaacattattatatagaaccatcatttgagtgtcggtttgatcacttggaagttcgagatgggccatttggtttctctcctcttatagatcgttactgtggcgtgaaaagccctccattaattagatcaacagggagattcatgtggattaagtttagttctgatgaagagcttgaaggactgggatttcgagcaaaatattcatttattccagatccagactttacttacctaggaggtattttaaatcccattccagattgtcagttcgagctctcgggagctgatggaatagtgcgctctagtcaggtagaacaagaggagaaaacaaaaccaggccaagccgttgattgcatctggaccattaaagccactccaaaagctaagatttatttgaggttcctagattatcaaatggagcactcaaatgaatgcaagagaaacttcgttgcagtctatgatggaagcagttctattgaaaacctgaaggccaagttttgcagcactgtggccaatgatgtaatgcttaaaacaggaattggagtgattcgaatgtgggcagatgaaggtagtcggcttagcaggtttcgaatgctctttacttcctttgtggagcctccctgcacaagcagcactttcttttgccatagcaacatgtgcatcaataattctttagtctgtaatggtgtccaaaattgtgcatacccttgggatgaaaatcattgtaaagaaaagaaaaaagcaggagtatttgaacaaatcactaagactcatggaacaattattggcattacttcagggattgtcttggtcctctcattattctattttagtacaagtgaaacagcctcgaaaaaaggtcatggcttgcaaaaccgcttttaataaaaccgggttccaagaagtgtttgatcctcctcattatgaactgttttcactaagggacaaagagatttctgcagacctngcagacttgtcgggaagaatttggacaactacccagaagatgcggggntccttcaacggcttcccggnggatccacgaccaccatttggggtcccaggctccagggggtaaaaaaagg

SEQ ID NO: 364 - DNA, 717 bp, Homo sapiens
  SITE (619): n equals a,t,g, or c
  SITE (625): n equals a,t,g, or c
  SITE (655): n equals a,t,g, or c
  SITE (673): n equals a,t,g, or c
  SITE (713): n equals a,t,g, or c
ctgccataagatggcgtccgtggcggctgcacgagcagttcccgtgggcagtgggctcaggggcctgcaacggaccctacctcttgtagtgattctcggggccacgggcaccggcaaatccacgctggcgttgcagctaggccagcggctcggcggtgagatcgtcagcgctgactccatgcaggtctatgaaggcctagacatcatcaccaacaaggtttctgcccaagagcagagaatctgccggcaccacatgatcagctttgtggatcctcttgtgaccaattacacagtggtggacttcagaaatagagcaactgctctgattgaagatatatttgcccgagacaaaattcctattgttgtgggargaaccaattattacattgaatctctgctctggaaagttcttgtcaataccaagccccaggagatkggcactgagaaagtgattgaccgaaaagtggagcttgaaaaggaggatggtcttgtacttcacaaacgcctaagccaggtggacccagaaatggctgccaagctgcatccacatgacaaacgcaaagtggccaggagcttgcaagtttttgaagaaacaggaatctctcatagtgaatttctncatcgncaacataccggaagaaagtggtggtccccnttggaggtcctctgaagntctctaacccttggatccttttggcttcatgcttgaccangcaa

SEQ ID NO: 365 - DNA, 796 bp, Homo sapiens
  SITE (763): n equals a,t,g, or c
  SITE (768): n equals a,t,g, or c
  SITE (787): n equals a,t,g, or c
gctcgaaattaaccctactaaagggaacaaaagctggagctccaccgcggtggcggccgctctagaactagtggatcccccgggctgcaggaattcggcacgagctcagccatgggagggagatggttccttctgcatgcttctctatctcctgatggctggtgctgagatgacaaatgcatctctctaggaactctgagcctcaccaccctggagactatgttgtttcttttcattagagctgtttctacatcctgtgctgagagccagctcttccacgcccatagaggggagtcccatgaccctgacctgtgagacccagctctctccacagaggccagatgtccagctgcaattctccctcttcagagatagccagaccctcggattgggctggagcaggtcccccagactccagatccctgccatgtggactgaagactcagggtcttactggtgtgaggtggagacagtgactcacagcatcaaaaaaaggagcctgagatctcagatacgtgtacagagtgagtgtctaaggggctgctcttccagagtcagagctggggagaggaaggccagtgatatctcctgcacccctaggatggtggacataacagagaggartgtccagctattctggtaatcttctctctttaagctcaacgktggtctaacagccctagacattttctttcacttggagtcaggtaatagtaattawtggatcaggtactgattgcccaaccytatgggggtacccganatggncaagaaccggttttttcangaatcaagg

SEQ ID NO: 366 - DNA, 504 bp, Homo sapiens
  SITE (357): n equals a,t,g, or c
tggaacacaagaagaaataaaatgtatggatcaaataaagaaaattgaaacaactggttgcaaccaagaaataacatcatttgaaattaatctgaaggaaaaaaagtaccaggaggactttaacccgctggtgagaggatgttcctgttactgctgtargatcacactcggggcatacatccaccatctgctggtgaccaatgagctgctggccggagtcctgcttatgatgcacaactttgaacactactttgggtttttccattacatccgggaagcactaaaaagtgacaaactggcacakttgaaagagctcatccacaggcaagcatcttgagatcttgcaaatacaagtcncactcttcacactgagcctgtaccactgttgtaacatgggaagacgtgaagaagaaataatctgagctttaattatttatatttggatataaggctgcttaaataaagaatctttgtaccaaactgcccacatgagggtgaagaggt

SEQ ID NO: 367 - DNA, 714 bp, Homo sapiens
  SITE (547): n equals a,t,g, or c
  SITE (557): n equals a,t,g, or c
  SITE (634): n equals a,t,g, or c
  SITE (670): n equals a,t,g, or c
  SITE (704): n equals a,t,g, or c
ggcagagttgcggcagacactttaccaaatcctacaatttgctcatccatgagaggacccacacggacgagaggccktacacgtgtgacatctgccacaaggccttccggaggcaagatcacctgcgggatcacagatacatccattccaaagaaaaacccttcaaatgtcaggagtgtgggaaaggattttgtcagtctagaactctagcagttcacaaaactttacacatgcagacatcaagccctacagctgcgagcagtgcggcaaagtgttcaggcgaaactgtgatctgcggcggcacagcctgactcacaccccgcggcaggacttctagagaagcccaggatctgtcccgtgccgccgctgctcccctccccagacacctytccacgtytcctacccagggggtcgcatccctagcccttcactgaccccagctcttcccttgctgcagccgcacctgcagctccagggagttaactcttcttctgggggactgagaactgtagaaagccacacactactacatcccttcacaaagagnatatgctagnttcttggtagatattcacagctcattttagagctctgtacataatggtggggggcctttggtttggtggtttggttngctttgggatcttggtggatgcactttagatatggnaaatggaaggcaaaatttatcttttaaggactgnattttcaaaa

SEQ ID NO: 368 - DNA, 274 bp, Homo sapiens
  SITE (37): n equals a,t,g, or c
  SITE (268): n equals a,t,g, or c
agagcaagctgagcccaggactgggtagccccatctngggcctcagtaaattgactccggacagaaagccctctcgaggaaggttgccctccaaaacgaaaaaagagtttatctgcagttttgcgggcagacactttaccaaatcctacaatttgctcatccatgagaggacccacacggacgagaggccgtacacgtgtgacatctgccacaaggccttcccggccctgccttttaccacccacctattccaccccaagcagggggncattgc

SEQ ID NO: 369 - DNA, 867 bp, Homo sapiens
  SITE (241): n equals a,t,g, or c
  SITE (320): n equals a,t,g, or c
  SITE (321): n equals a,t,g, or c
ggcgtggggtgccaagcgcctgcgatgggggtcctaagagccacggggggaagaggggcaggctctccgtccctgcctcgcggggggtgcctctccccgctgtgatgggggtcctaatagccagggggcgcagaggggctggctctcaagtccccgcctcgtgtggggtgcctccctcaccagcaatggggctcctaagagccaggggggaagaggggctggytccggtacattgcaaatnacctgctttttttctgatcccgagctgcgttcagacccctgtcggatagtaaatcccaagtaaggcacctgccktcggnngatctgagctttcttcttggacacctaaaacccacagtcctccagcagtgaaggatccagtgagattttccaggttaacggtcataaccgcctactggtccaacgttcagaagtaacacaggcacctggacaatacacagtagatgtggaaggacacggttgtacatttatccaggccacccttaagtacaatgttctcctacctaagaaggcatctggattttctctttccttggaaatagtaaagaactactcttcgactgcttttgacctcacagtgamcctcaaatacactggaattcgcaataaatccagtatggtggytatagatgtaaaaatgctatcaggatttactccaaccatgtcatccattgaagagttgctacctgtgtttatgaaaacatcacggcaccaaggaatgttccataaaacagaacttgacgtagaaaagagtggacattgagttctgcagtgggctatggtttcttgtcaagtcttatttccttatcatcccattaaatgttgtcattttgcatctgaaaaaaa

SEQ ID NO: 370 - DNA, 1446 bp, Homo sapiens
  SITE (1): n equals a,t,g, or c
nttcaattttttytttttttttttttttttttaagagtttctagagtttttattattcaaaatgagtttcatttcaattcaggtacttgaaagaaggttctagtctgttactttgacacagcacaagatcagtagtttattccaatgaagtattccacccaaatgaaagcataacatgcaagtagttatttatttcaatcactcctatttgaaggtcctcatttttggagaacagccaggcattttattatccactctttccattccttaaaggcttccacgggtttcggtaaattcccattatcctcgtgactgtgttctggagttgctccaggtgtgtcagaagattcatcatcaatccacctcaccagtgctttgtatctttctacaatgctgaagccaacagcacactgcaacttgtgcaaacagatagggcaaaggtttagagggcgccggtcagcttcttccaagtggttggagccttgcatgaggcatgcaagccactggcagtgtcgcagtccaaatatgtgtccgatctcatgggttaaagtcttacaggatcgaagtagtaaaacactagttatttctggaatataatagttgtcgaaaattgaatagtcacttgaagatgttttcttgagcttcttcactttgcctttatagtgcatgctataaaaatcactgccatacctggcaaagctgaatatccccacaccatctgtcaaagaggcctgtccaaagacaaaattccacgagtctcttgggtaaagatcaatcattgttattcccacaacacagaaggcatcttcaggtttcttctttttcaagaacttcaggatgtcccctgcatgaatttgtaggttgtgtgtgttctcattgactctaaaggaacatcttgttacagaaacaggaactggttctaggagttttactctcaagccatagaaatatgctttacagtagcccgtgagccatttaatatattcttcactgataattctggtgtttcctagagagccaatggactgtatataaatgctgcgtttgtttggagagggtgtctttctgtaaggatcactgaagaactgttcaaagtcttggggagcctcagggtgggaggtgatccaatctgatggagaatgcaaggtaatgggtccaaagagatcactggctggctggaaggcttcattcattaaacgttgttccccagcatctaatttctcatactgtgatacaagcactgggttctttgagatgagagctgtttttagtgtctgttcggagtgccgtattatttgcatcttgattaggaaggaaggctcccatggaagcttttaacttacaaggacggacatgtctgggcctggctggaagaaagttgtggagtgtgacttcatcttaatattaaaaaggcagtgtgaaaggtcaggaggcctcctcttgccc

SEQ ID NO: 371 - DNA, 1639 bp, Homo sapiens
ggggaagaacacagtggttgccatagctgtatggtctcacttcagcaccttccctttggaagtgtacatccggcggctcaggaacatccgtcgagcagtggttcggctcctcgatcgaagcccaaagaccgtkgtggtcatccggacggccaacgcccaagagctgggacctgaggtgagccttttcaacagcgactggtacaactttcagctggacaccatccttcggaggatgttctcaggggttggagtatatctcgtcgatgcctgggagatgaccctggcccattatctaccgcacaagctgcatycagatgaagttattgtgaagaaccagctggacatgttcttgtcctttgtgtgccccttggaaacctagcctgtcttggaagggactkgaggaatcatattcaatgaccttctcaattgacctgagttacagaaagtggccccagtgagagatgactgcccttaataagtataaaatttcaaaaagatctggacttaatatgatgacttataaggagcttagaaaatgcaggttacatttatatctacctataggattttatccaatgttgacttagccatggtagaactcttaactgcatctacacactatattgctcttgtaaccaaagatgctaatgagtgtatttgaattagcttctcctaggaggggtgactactttgctaaagagtatgaaaaatgttttgatggaagggacaagtttggttggtagtagagtgtttgtagcttatctggtaaaggaaattgagtgcatctgcatgcatagcacaagtaatccatcttctggcggttaactagagaaagcttatagtcagaggctcttgtgaatgcactgaagactgctgtgtctcaggagtttctcttgatgatctaccttttctgaattacttgaaaaggccaatgtgcttggttcgagttttttagtgaatatttacaatttcctgcttttatctagaaaagaagcaaaagggaaatatgaaagcagtatatataaaatctgtgctttggaattgatatttgcatttggtgattgttttttatttgattcagctaaattttatgtgttgaatacttactctagaataactacttttggaactggaagggggaaatctgtaaatggaaatttatttttatgttctgaaatttgagggtttaggaattgacttttgtgtaaagaatgctacggtattataaagctgtggaagttttttccactagtttcaggtgtttttttttgttgttgttgttgttgttattttgaactacttaccaaaattagaagttaaaatctaattagaaattaataagatactaaaattcatgacagttttttgtttgtttgtttgtttgttttttggtatttcttgatttgggcataaaaggcacacccattctctcatgcttggaagaagctgctattcctactggctatctaagaagaatggaattattaattttatttgacttattaattttaaacgagtttaatttgggwtcatttagtaagtactcttttctttttgagctgtgatagattatagtctagtttaagttgctcctaagtagacagatgaagaaactagggagtttttgagtgtttgacag

SEQ ID NO: 372 - DNA, 596 bp, Homo sapiens
  SITE (439): n equals a,t,g, or c
  SITE (499): n equals a,t,g, or c
  SITE (530): n equals a,t,g, or c
  SITE (570): n equals a,t,g, or c
gcacaacgatgggctgggcaatgcctttgatggcccagggggcgccctggcgcacgccttcctgccccgccgcggcgaagcgcacttcgaccaagatgagcgctggtccctgagccgccgccgcgggcgcaacctgttcgtggtgctggcgcacgagatcggtcacacgcttggcctcacccactcgcccgcgccgcgcgcgctcatggcgccctactacaagaggctgggccgcgacgcgctgctcarctgggacgacgtgctggccgtgcagarcctgtatgggaagcccctagggggctcartggccgtccagctyccaggaaagctgttcactgactttgagacctgggactcctacagcccccaaggaaggcgcccttgaaacgcarggcccttaaaatactggcactcttccttcgatggccatcactgtaanacaggcaacaagcaactggtacatttttaaagggaagcaattttctgggaaggtgcaagntgatgggaaccgtttaaaaacccgtcactgnaggaaagatggttcgggctgcccccaaaattgaggtgcgnagggcattgaatgatgagaatttact

SEQ ID NO: 373 - DNA, 1083 bp, Homo sapiens
gcttttgcaaagctatttaggtgacactatagaaggtacgcctgcaggtaccggtccggaattcccgggtcgacccacgcgtycgcccacgcgtccggggtggcacatatacattgagggacctgaaagagaagtgattgtggacgatcagcaatcctgtgacattaacatgtgatgccactgggatcccacctcccacgatagcatggttaaagaaccacaagcgcatagaaaattctgactcactggaagttcgtattttgtctggaggtagcaaactccagattgcccggtctcagcattcagatagtggaaactatacatgtattgcttcaaatatggagggaaaagcccagaaatattactttctttcaattcaagttcctccaagtgttgctggtgctgaaattccaagtgatgtcagtgtccttctaggagaaaatgttgagctggtctgcaatgcaaatggcattcctactccacttattcaatggcttwaagatggaaagcccatagctagtggtgaaacagaaagaatccgagtgagtgcaaatggcagcacattaaacatttatggagctcttacatctgacacggggaaatacacatgtgttgctactaatcccgctggagaagaagaccgaatttttaacttgaatgtctatgttacacctacaattaggggtaataaagatgaagcagagaaactaatgactttagtggatacttcaataaatattgaatgcagagccacagggacgcctccaccacagataaactggctgaagaatggacttcctctgcctctctcctcccatatccggttactggcagcaggacaagttatcaggattgtgagagctcaggtgtctgatgtcgctgtgtatacttgkgtggcctccaacagagctggggtggataataagcattacaatcttcaagtgtttgcacctcgaaaaaaaaaaaaaaaaaaaaaaaaaaaaaaaaaaaaaaaaaaaaaaaaaaaaaaaaaaaagggcggccgctctagaggatccctcgaggggccccaagttacgcgtgcatgcgacgtcatagctctca

SEQ ID NO: 374 - DNA, 1684 bp, Homo sapiens
  SITE (11): n equals a,t,g, or c
  SITE (12): n equals a,t,g, or c
  SITE (15): n equals a,t,g, or c
  SITE (1576): n equals a,t,g, or c
  SITE (1671): n equals a,t,g, or c
ccttttagctnntgnaaaaggctatttaggtgacactatagaaggtacgcctgcaggtaccggtccggaattcccgggtcgacccacgcgtccgcccacgcgtccgyyyacgcgtccgcccacgcgtccgggctggccctgggcatgggccagggcctcaaagcctggccacggtaccgggttgtgggctccgcagacgctgggcagtacaacctggagatcacagatgctgagctctctgacgacgcctcttacgagtgccaggccacggaggccgccctgcgctctcggcgggccaaactcaccgtgctcatccccccagaggacaccaggattgacggaggccctgtgattctactgcaggcaggcaccccccacaacctcacatgccgggccttcaatgcgaagcctgctgccaccatcatctggttccgggacgggacgcagcaggagggcgctgtggccagcacggaattgctgaaggatgggaagagggagaccaccgtgagccaactgcttattaaccccacggacctggacatagggcgtgtcttcacttgccgaagcatgaacgaagccatccctagtggcaaggagacttccatcgagctggatgtgcaccaccctcctacagtgaccctgtccattgagccacagacggtgcaggagggtgagcgtgttgtctttacctgccaggccacagccaaccccgagatcttgggctacaggtgggccaaagggggtttcttgattgaagacgcccacgagagtcgctatgagacaaatgtggattattcctttttcacggagcctgtgtcttgtgaggttcacaacaaagtgggaagcaccaatgtcagcactttagtaaatgtccactttgctccccggattgtagttgaccccaaacccacaaccacagacattggctctgatgtgacccttacctgtgtctgggttgggaatccccccctcactctcacctggaccaaaaaggactcaaatatggggcccaggcctcctggctccccacccgaggctgctctctctgcccaggtcctgagtaacagcaaccagctgctgctgaagtcggtgactcaggcagacgctggcacctacacctgccgggccatcktgcctcgaatcggagtggctgagcgggaggtgccgctctatgtgaacgggccccccatcatctccagtgaggcagtgcagtatgctgtgaggggtgacggtggcaaggtggagtgtttcattgggagcacaccacccccagaccgcatagcatgggcctggaaggagaacttcttggaggtggggaccctggaacgctatacagtggagaggaccaactcaggcagtggggtgctatccacgctcaccatcaacaatgtcatggaggccgactttcagactcactacaactgcaccgcctggaacagcttcgggccaggcacagccatcatccagctggaagagcgagaggtgttacctgtgggcatcatagctggggccaccatcggcgcgagcatcctgctcatcttcttcttcatcgccttggtattcttcctctaccggngccgcaaaggcagtckcaaagacgtgaccctgaggaagctggatatcaaggtggagacagtgaaccgagagccacttacgatgcattctgaccgngaggatgacaccg

SEQ ID NO: 375 - DNA, 1451 bp, Homo sapiens
  SITE (673): n equals a,t,g, or c
  SITE (1209): n equals a,t,g, or c
  SITE (1215): n equals a,t,g, or c
cttttgcaaaaagctatttaggtgacactatagaaggtacgcctgcaggtaccggtccggaattcccgggtcgacccacgcgtccgcccacgcgtccgcccacgcgtccgtgactgcagaacattctggaaactactcctgtgatgcagacaatggcctgggggcccagcacagtcatggagtgagtctcagggtcacagttccggtgtctcgccccgtcctcaccctcagggctcccggggcccaggctgtggtgggggacctgctggagcttcactgtgagtccctgagaggctccttcccgatcctgtactggttttatcacgaggatgacaccttggggaacatctcggcccactctggaggaggggcatccttcaacctctctctgactacagaacattctggaaactactcatgtgaggctgacaatggcctgggggcccagcacagtaaagtggtgacactcaatgttacaggaacttccaggaacagaacaggccttaccgctgcgggaatcacggggctggtgctcagcatcctcgtccttgctgctgctgctgctctgctgcattacgccagggcccgaaggaaaccaggaggactttctgscactggaacatctagtcacaagtcctagtgagtgtcaggagccttyctcgtccargccttncaggatagaccctyaagagcccactyactytaaaccactasccccaatggarctggagccaatgtacagcaatgtaaatcctggagatagcaacccgatttattyccagatytggagcatccagcatwcaaaagaaaactcagctaattgtccaatgatgcatcaagagcatgaggaacttacagtcctctattcagaactgaagaagacacacccagacgactctgcaggggaggctagcagcagaggcagggcccatgaagaagatgatgaagaaagctatgagaatgtaccacgtgtattactggcctcagaccactagccccttacccagagtggcccacaggaaacagcctgcaccatttttttttctgttctctccaaccacacatcatccatctctccagactctgcctcctacgaggctgggctgcagggtatgtgaggctgagcaaaaggtctgcaaatctcccctgtgcctgatctgtgtgttccccaggaagagagcaggcagcctctgagcaagcactgtgttnttttcncagtggagacacgtggcaaggcaggagggccctcagctcctagggctgtcgaatagaggaggagagagaaatggtctagccagggttacaagggcacaatcatgaccatttgatccaagtgtgaccgaaagctgttaatgtgctctctgtataaacaatttgctccaaaaaaaaaaaaaaaaaaaaaaaaaaaaaaaagggcggccgctctagaggatccctcgaggggccacaaa

SEQ ID NO: 376 - DNA, 652 bp, Homo sapiens
  SITE (489): n equals a,t,g, or c
  SITE (573): n equals a,t,g, or c
  SITE (622): n equals a,t,g, or c
  SITE (639): n equals a,t,g, or c
  SITE (642): n equals a,t,g, or c
  SITE (646): n equals a,t,g, or c
ccatgcttggagaaggacaagtccttcggagcccaaccaaccggctgcttctgcacttccagagcccacgggtcccaaggggcggtggcttcaggatccactatcaggcctacctcctgagctgtggcttccctccccggccggcccatggggacgtgagtgtgacggacctgcaccctgggggcactgscacctttcactgtgattcgggctaccagctgcagggagaggagaccctcatctgcctcaatggcacccggccatcctggaacggtgaaacccccagctgcatggcatcctgtggtggcaccatccacaatgccaccctgggccgsatcgtgtccccagagcctgggggagccgtagggcccaacctcacctgccgttgggtcattgaagcagctgaggggcgccggctgcacctgcactttgaaagggtctcgctggatgaggacaatgaccggctgatggtgcgctcarggggcaagncccctatcccccgtgatctatgattcggacatggacgatgtccccgagcggggtctcatcaagtgacgcccagtccctctacgnggagcttgctgtcagagacacctggcaatcccctgctggtaaaccttcnatttgaagccttttganganggancgcttg

SEQ ID NO: 377 - DNA, 618 bp, Homo sapiens
  SITE (614): n equals a,t,g, or c
  SITE (615): n equals a,t,g, or c
  SITE (616): n equals a,t,g, or c
tcgcccgctcgaaattaaccctactaaagggaacaaaagctggagctccaccgcggtggcggccgctctagaactagtggatcccccgggctgcaggaattcggcacgagacggaggcccggaccgtgctcaggtgctgccgagggtggacgcagcagcccgacgaggagggctcctctcggctgaatgcagcgccggcctctgttttcacggtggccgttgtgtgccaggctcagcccagccgtgtcactgtccccccggcttccagggaccccgctgtcagtatgatgtggacgaatgccgaacccacaacggtggctgccagcaccggtgcgtgaacaccccaggctcctacctctgtgagtgcaagcccggcttccggctccacactgacagcaggacctgcctggccattaactcctgcgccctgggcaatggcggctgccagcaccactgtgtccagctcacaatcactcggcatcgctgccagtgccggcccgggttccagctccaggaggacggcaggcattgtgtccgtgagtgctgcagcctgggagggaggacctgggggtggaggcaggacaagctgcctcgcctggcctgttgagcggaannngc

SEQ ID NO: 378 - DNA, 1702 bp, Homo sapiens
gcaaggattgtagcttggactgtgcgggttcgccccagaaacctctctgcgcatctgacggaaggaccttcctttcccgttgtgaatttcaacgtgccaagtgcaaagatccccagctagagattgcatatcgaggaaactgcaaagacgtgtccaggtgtgtggccgaaaggaagtatacccaggagcaagcccggaaggagkttcagcaagtgttcattcctgagtgcaatgacgacggcacctacagtcargtccagtgtcacagctacacgggatactgctggtgcgtcacgcccaacgggaggcccatcagcggcactgccgtggcccacaagacgccccggtgcccgggttccgtaaatgaaaagttaccccaacgcgaaggcacaggaaaaacagatgatgccgcagctccagcgttggagactcagcctcaaggagatgaagaagatattgcatcacgttaccctaccctttggactgaacaggttaaaagtcggcagaacaaaaccaataagaattcagtgtcatcctgtgaccaagagcaccagtctgccctggaggaagccaagcagcccaagaacgacaatgtggtgatccctgagtgtgcgcacggcggcctctacaagccagtgcagtgccacccctccacggggtactgctggtgcgtcctggtggacacggggcgccccattcccggcacatccacaaggtacgagcagccgaaatgtgacaacacggccagggcccacccagccaaagcccgggacctgtacaagggccgccagctacaaggttgtccgggtgccaaaaagcatgagtttctgaccagcgttctggacgcgctgtccacggacatggtccacgccgcctccgacccctcctcctcgtcaggcaggctctcagaacccgaccccagccataccctagaggagcgggtggtgcactggtacttcaaactactggataaaaactccagtggagacatcggcaaaaaggaaatcaaacccttcaagaggttccttcgcaaaaaatcaaagcccaaaaaatgtgtgaagaagtttgttgaatactgtgacgtgaataatgacaaatccatctccgtacaagaactgatgggctgcctgggcgtggcgaaagaggacggcaaagcggacaccaagaaacgccacacccccagaggtcatgctgaaagtacgtctaatagacagccaaggaaacaaggataaatggctcataccccgaaggcagttcctagacacatgggaaatttccctcaccaaagagcaattaagaaaacaaaaacagaaacacatagtatttgcactttgtactttaaatgtaaattcactttgtagaaatgagctatttaaacagactgttttaatctgtgaaaatggagagctggcttcagaaaattaatcacatacaatgtatgtgtcctcttttgaccttgggaaatctgtatgtggtggagaagtatttgaatgcatttaggcttaatttcttcgccttccacatgttaacagtagagctctatgcactccggctgcaatcgtatggctttctctaacccctgcagtcacttccagatgcctgtgcttacagcattgtggaatcatgttggaagctccacatgtccmtggaagtttgtgatgttcgggcgaacctacaggcagttaacatgcatgggctggtt

SEQ ID NO: 379 - DNA, 1732 bp, Homo sapiens
  SITE (15): n equals a,t,g, or c
  SITE (957): n equals a,t,g, or c
  SITE (1017): n equals a,t,g, or c
actcactatagggcnattgggtacgggccccccctcgagttttttttttttttttttatgaaaaaaagttgtgaaaatttatttaggctgattttagtgtaacattgttttttataaaataattttataaaagagtccatcaagatattatatagaaaatgcacactaaggtaatatatatacacttcataaaaatagaatacatcttggcaattgcttagagtctattaccaccatgtacagtgtattgacgtgtaatatttatgttaatttgaacacatgagatttttaaaaaaccaaacctgtcccactggtatctttaaaaattgctttcattgacaggaaaataaacaaaattctggaacgtaaaagttatgaagctaactggatgaaagtttatattaaaatttttaaagttccatgccatgtacaactgacgtgagggcaaagcagtcttttttattattattatcataagtggttcagctgatctcacaaaatcactgaaaataatatccttgttctgaatgttcaatcaagataagcaccatttgggatcaaacaagccttatagtagctgkactatattttataaaatgagtggtgkttttcttcttaaaaatgaaaataggcaagtcctattataatgtatcaatacttacaaaaatctccgtaagttattttataagctttgatcaaaatacttagtaactaattttatgattctaaaaatagtcaaatgctcaaaaactctatttgattctgaattagytgctcttgcttttcgctgcttggtttggctttcaggaaaatgatcttaggtactacactactgtaaaccatcactgatatgtcctgttagatgttcagaataatctttgggaagtaactgctccagtgtaataaataaaataataagggacttttctagaccatacttcaagatatgaccatggngggatcatgaaaatacctcagaagtaccaaggaaggcacacaaaacagagtgtagcaccnttttcaagctgccaagattgcaactgttcaagagacagtaatctggaagggggcttgattgccatgattaatgcggtttaaatatgtggaataggctttggagagttccttagtatggataggcggrcmcagctatataaactatgaatgtgggtctgatattcaatggtcccattgcactgtagatgaggctcggaccctcatgcggtaggtctctgcttctcgtagtggtcgtgttgtatacaccactcctttcaggttttcatccctcaaggcaaaaggaacagtctgttcctcatctaccatgaggaaagttgtcctgggatgcatcactccatctttcatccaggtcactgttggtggtggaataccctgcacctcacactccaaggagatactcttccctcgggtcacaataatttcagtagggtggctgccactgttggttatggttggtctaatgtaaacttgcagattgtattctttctttgcagtcccagcaacattcgacgccacacatgaatagagtgctgcatcagacttttcagcaattgaaatttgtaattgcctgcccccagataaaattctaactcgccccatggaatcagtcagcactggagagcctttcttcttccagatgagatttgggggtggaataccacttgattcacacaacagactaatgagattcccttcaatgaccggacgcgtgggc

SEQ ID NO: 380 - DNA, 2596 bp, Homo sapiens
  SITE (1): n equals a,t,g, or c
  SITE (2508): n equals a,t,g, or c
  SITE (2529): n equals a,t,g, or c
  SITE (2556): n equals a,t,g, or c
ngctcgaaattaaccctcctaaagggaacaaaagctggagctccaccgcggtggcggccgctctagaactagtggatcccccgggctgcaggaattcggcacgagggagcatggagcgcttggcagccttggggaacatgcagcgaaagttgtgggaaaggtactcagacaagagcaagactttgtaataacccaccaccagcgtttggtgggtcctactgtgatggagcagaaacacagatgcaagtttgcaatgaaagaaattgtccaattcatggcaagtgggcgacttgggccagttggagtgcctgttctgtgtcatgtggaggaggtgccagacagagaacaaggggctgctccgaccctgtgccccagtatggaggaaggaaatgcgaagggagtgatgtccagagtgatttttgcaacagtgacccttgcccaacccatggtaactggagtccttggagtggctggggaacatgcagccggacgtgtaacggagggcagatgcggcggtaccgcacatgtgataaccctcctccctccaatgggggaagagcttgtgggggaccagactcccagatccagaggtgcaacactgacatgtgtcctgtggatggaagttggggaagctggcatagttggagccagtgctctgcctyctgtggaggargtgaaaagactcggaagcggctgtgcgaccatcctgtgccagttaaaggtggccgtccctgtcccggagacactactcaggtgaccaggtgcaatgtacaagcatgtccaggtgggccccagcgagccagaggaagtgttattggaaatattaatgatgttgaatttggaattgctttccttaatgccacaataactgatagccctaactctgatactagaataatacgtgccaaaattaccaatgtacctcgtagtcttggttcagcaatgagaaagatagtttctattctaaatcccatttattggacaacagcaaaggaaataggagaagcagtcaatggctttaccctcaccaatgcagtcttcaaaagagaaactcaagtggaatttgcaactggagaaatcttgcagatgagtcatattgcccggggcttggattccgatggttctttgctgctagatatcgttgtgagtggctatgtcctacagcttcagtcacctgctgaagtcactgtaaaggattacacagaggactacattcaaacaggtcctgggcagctgtacgcctactcaacccggctgttcaccattgatggcatcagcatcccatacacatggaaccacaccgttttctatgatcaggcacagggaagaatgcctttcttggttgaaacacttcatgcatcctctgtggaatctgactataaccagatagaagagacactgggttttaaaattcatgcttcaatatccaaaggagatcgcagtaatcagtgcccctccgggtttaccttagactcagttggacctttttgtgctgatgaggatgaatgtgcagcagggaatccctgctcccatagctgccacaatgccatggggacttactactgctcctgccctaaaggcctcaccatagctgcagatggaagaacttgtcaagatattgatgagtgtgctttgggtaggcatacctgccacgctggtcaggactgtgacaatacgattggatcttatcgctgtgtggtccgttgtggaagtggctttcgaagaacctctgatgggctgagttgtcaagatattaatgaatgtcaagaatccagcccctgtcaccagcgctgtttcaatgccataggaagtttccattgtggatgtgaacctgggtatcagctcaaaggcagaaaatgcatggatgtgaacgagtgtagacaaaatgtatgcagaccagatcagcactgtaagaacacccgtggtggctataagtgcattgatctttgtccaaatggaatgaccaaggcagaaaatggaacctgtattgatattgatgaatgtaaagatgggacccatcagtgcagatataaccagatatgtgagaatacaagaggcagctatcgttgtgtatgcccaagaggttatcggtctcaaggagttggaagaccctgcatggacattaatgaatgkgaacaagtgcctaaaccttgtgcacatcagtgctccaacacccccggcagcttcaagtgtatctgtccaccaggacaacatttattaggggacgggaaatcttgcgctggattggagaggctgccaaattatggcactcaatacagtagctataaccttgcacggttctcccctgtgagaaacaactatcaacctcaacagcattacagacagtactcacatctctacagctcctactcagagtatagaaacagcagaacatctctctccaggactagaaggactattaggaaaacttgccctgaagctctgaggcaagccatgaccatgtgtagatattgatgaatgtgaaaatacagatgcctgccacatgantgtaagaatacctttggaagntatcagtgcatctgccacctggctatnaacttacaccccatggaaagacatgcccagatatcgataa

SEQ ID NO: 381 - DNA, 359 bp, Homo sapiens
  SITE (300): n equals a,t,g, or c
  SITE (348): n equals a,t,g, or c
aaaaaccatctcagaaaaaggaaaatgggcaatcgtcatgctaaagcgagcagtcctcagggttttgatgtggatcgagatgccaaaaagctgaacaagcctgcaaaggaatggggaccaatgaagcagccatcattgaaatcttatcgggcaggacatcagtgagaggcaacaaatcaagcaaaagtacaaggcaacgtacggcaaggagctggaggaagtacttcaagagtgagctgagtggaaactttcgagaagacagcgttggcccttctggaccgtcccagcgagttacggcgnccggcagctgcagaaggttattgaagggttttggggcacaattgagtnccttcctcaat

SEQ ID NO: 382 - DNA, 462 bp, Homo sapiens
  SITE (435): n equals a,t,g, or c
gacttttagttgtttcattgttaatatgtagaaacacaattgatttttgtatattgaactttgtatactgcagtcttgccaagttcccttattaacttagggaggtttctttggtagactctttggggttttctatctatatatataatcatgctgcctggaataaagacagttttacttcttccattccatttttgccttttatttatttttcatgccttattgcactggctaggatttctagtatatgttaaaaagagaaagcattcagtctttcttcattaaacatgatgttagctatatctgttttaaagaggctgtttatcaggttgagtaagtttcattctattcctggtttagtagagcttttatcattaatagatgktgaatttgcaagtgatttttaaaatactattgagawtatatgggtttaancttatttwatgataagggaaatatgta

SEQ ID NO: 383 - DNA, 563 bp, Homo sapiens
  SITE (481): n equals a,t,g, or c
tcgacccacgcgtccgctgcagctgtggggagatttcagtgcattgcctcccctgggtgctcttcatcttggattattccttgggcctgaatgacttgaatgtttccccgcctgagctaacagtccatgtgggtgattcagctctgatgggatgtgttttccagagcacagaagacaaatgtatattcaagatagactggactctgtcaccaggagagcacgccaaggacgaatatgtgctatactattactccaatctcagtgtgcctattgggcgcttccagaaccgcgtacacttgatgggggacatcttatgcaatgatggctctctcctgctccaagatgtgcaagaggctgaccagggaacctatatctgtgaaatccgcctcaaaggggagagccaggtgttcaagaaggcggtggtactgcatgtgcttccagaggagcccaaaggtacgcaaatgcttacttaaagaggggncaaagggcaagagctttcatgtgcaagaaggcaaggaaactgattatcttgagtaattgccagcctttggggctaagtactt

SEQ ID NO: 384 - DNA, 421 bp, Homo sapiens
ctgaggctcagccaagcccaggggaacctgtcggttctggagacccggcaggtacagctggagtgtgtggttctcaaccgcaccagcataacctcccagctcatggtggaatggtttgtatggaagcccaaccaccctgagcgggagactgtggcccgcttgagccgtgacgccaccttccactatggagagcaggcagccaagaacaatctgaaggggcggctgcatttggagagtccttcccccggcgtgtaccgtctcttcatccagaacgtggctgtgcaggacagcgggacctacagctgccatgtggaggagtggctgcccagccccagtggcatgtggtataagcgggcagaggacaccgctgggcagacagctctggacattcatgcgaccagatgctttccctgcaggtgga

SEQ ID NO: 385 - DNA, 445 bp, Homo sapiens
  SITE (215): n equals a,t,g, or c
  SITE (424): n equals a,t,g, or c
  SITE (445): n equals a,t,g, or c
gatgcacattattgaagagacacaagtgttcagggagtcccagtctgtggaaaatctagtcatctctctattgcagcacagcctctatgtgggggctcctagcggagtcatccagctaccactctccagctgctcccgctaccgatcctgctatgactgcatcttggcccgagacccctactgtggctgggaccctggcacccatgcctgcgcanagccaccaccatagccaacaggtcccagggaagcaggacagcactgatacaggacatagagagaggaaatcgaggctgtgagagcagcagggatacagggccamcamcaccactgaagacccgctctgtgctccggggtgatgatgtcctcctgccctgtkamcagccatccaacctggcccgggccttgtggctactcaatgggagcntgggcctgagcgatgggcaan

SEQ ID NO: 386 - DNA, 584 bp, Homo sapiens; identical to SEQ ID NO: 203
  SITE (380): n equals a,t,g, or c
  SITE (416): n equals a,t,g, or c
  SITE (471): n equals a,t,g, or c
  SITE (487): n equals a,t,g, or c
  SITE (545): n equals a,t,g, or c

SEQ ID NO: 387 - DNA, 541 bp, Homo sapiens
  SITE (505): n equals a,t,g, or c
  SITE (519): n equals a,t,g, or c
gttccgggcagggaatgatataagctggaaggctccagtggccacaaacaacccagcttgggcagtgcaggaggaaactcgggaccgattccacctccttggggacccacagaccaaaaattgcaccctgagcatcagagatgccagaatgagtgatgcggggagatacttctttcgtatggagaaaggaaatataaaatggaattataaatatgaccagctctctgtgaacgtgacagccccagcaccacggcaccagcctcacctgtcaggtgaccttgcctggggccggcgtgaccacgaacaggaccatccaactcaatgtgtcctaccctcctcagaacttgactgtgactgtcttccaaggagaagggcacagcatccacagctctgggggaacarcttcatctctttcagtcctagaggggccagtctctgcgcttggtctgtgtgttgacagaatccccctgccaggctgagctggactggaggagttgacctgtanccctcacagccttnaaacctctggtatggagctgca

SEQ ID NO: 388 - DNA, 388 bp, Homo sapiens
  SITE (112): n equals a,t,g, or c
  SITE (316): n equals a,t,g, or c
  SITE (337): n equals a,t,g, or c
  SITE (385): n equals a,t,g, or c
ttgctccggagcgtccagagtcctggccctgagcgggaatcgcagtggccgaggctgagcggcaggcggatcgccccgaccctcactcctggcgtctgagtctctggcgtancccatgctgagtgggcggytggtcctgggtctggtctccatggctggccgcgtttgtttgtgccagggcagcgcgggatccggggccatcggtccggtggaggccgccattcgcacgaagttggaggaggccctgagccccgaggtgctagagcttcgcaacgagagcggtggccacgcggtcccgcctggcagtgagactcanttccgcgtggctgtggtgagntttcgtttcgagggactgagccccttacaacgacaacggttggtccangca

SEQ ID NO: 389 - DNA, 474 bp, Homo sapiens
ctgactgtgagtggccccagcaccgtgatgggcgccgtgggggaatccctgagtgttcagtgtcggtatgaagagaaatacaagacgtttaacaaatactggtgcagacaaccatgcttgccaatttggcatgaaatggtggagaccggagggtctgagggagtggtgaggagtgaccaagtgatcatcacggaccatcctggaracctcaccttcaccgtgaccttggaraacctcacggcagacgatgcaggaaaataccgatgtgggattgcaacaatactgcaggaagatggcctgtctggtttcctgcccgatcccttcttccaggttcaagtgctggtctcatcggcctccagtactgagaactctgtgaagacacctgcatctcccaccaggcccagccaatgccaagggtccctgcccagcagcacctgcttcctgcttctcccactcctgaaggtgcctctgctc

SEQ ID NO: 390 - DNA, 2622 bp, Homo sapiens
ggcacgagtagagccgatctcccgcgccccgaggttgctcctctccgaggtctcccgcggcccaagttctccgcgccccgaggtctccgcgccccgaggtctccgcggcccgaggtctccgcccgcaccatgcggctgggcagtcctggactgctcttcctgctcttcagcagccttcgagctgatactcaggagaaggaagtcagagcgatggtaggcagcgacgtggagctcagctgcgcttgccctgaaggaagccgttttgatttaaatgatgtttacgtatattggcaaaccagtgagtcgaaaaccgtggtgacctaccacatcccacagaacagctccttggaaaacgtggacagccgctaccggaaccgagccctgatgtcaccggccggcatgctgcggggcgacttctccctgcgcttgttcaacgtcaccccccaggacgagcagaagtttcactgcctggtgttgagccaatccctgggattccaggaggttttgagcattgaggttacactgcatgtggcagcaaacttcagcgtgcccgtcgtcagcgccccccacagcccctcccaggatgagctcaccttcacgtgtacatccataaacggctaccccaggcccaacgtgtactggatcaataagacggacaacagcctgctggaccaggctctgcagaatgacaccgtcttcttgaacatgcggggcttgtatgacgtggtcagcgtgctgaggatcgcacggacccccagcgtgaacattggctgctgcatagagaacgtgcttctgcagcagaacctgactgtcggcagccagacaggaaatgacatcggagagagagacaagatcacagagaatccagtcagtaccggcgagaaaaacgcggccacgtggagcatcctggctgtcctgtgcctgcttgtggtcgtggcggtggccataggctgggtgtgcagggaccgatgcctccaacacagctatgcaggtgcctgggctgtgagtccggagacagagctcactggccacgtttgaccggagctcaccgcccagagcgtggacagggcttccatgagacgccaccgtgagaggccaggtggcagcttgagcatggactcccagactgcaggggagcacttggggcagcccccagaaggaccactgctggatcccagggagaacctgctggcgttggctgtgatcctggaatgaggccctttcaaaagcgtcatccacaccaaaggcaaatgtccccaagtgagtgggctccccgctgtcactgccagtcacccacaggaagggactggtgatgggctgtctctacccggagcgtgcgggattcagcaccaggctcttcccagtaccccagacccactgtgggtcttcccgtgggatgcgggatcctgagaccgaagggtgtttggtttaaaaagaagactgggcgtccgctcttccaggacggcctctgtgctgctggggtcacgcgaggctgtttgcaggggacacggtcacaggagctcttctgccctgaacgctcccaacctgcctcccgcccggaagccacaggacccactcatgtgtgtgcccacaagtgtagttagccgtccacaccgaggagcccccggaagtccccactgggcttcagtgtcctctgccacattccctgggaggaacaatgtccctcggctgttccggtgaaaagttgagccacctttggaagacgcacgggtggagtttgccagaagaaaggctgtgccagggccgtgtttggctacaggggctgccggggctcttggctctgcagcgagaaagacacagcccagcagggctggagacgcccatgtccagcaggcgcaggcctggcaacacggtccccagagtcctgagcagcagttaggtgcatggagagggtatcacctggtggccacagtcccccttctcacctcagcaatgatccccaaagtgagaggtggctcccccggcccccaccaccctcagcagccccaccccactcaaccctgagggtccccagggtcctgatgaagacctccgaccccagcgccaggctcctcggagcccaacagtcccaagggggcaggagacggggtggtccagtgctgaggggtacagccctgggccctgaccagccccggcacctgccatgctggttcccggaatgaatcagctgctgactgtctccagaagggctggaaaggatgctgccaggtgacccgaggtgcactcgccccagggagatggagtagacagcctggcctggccctcgggacacattgtctgccccggggctatgggcaaatgcccctccttcttacttcccagaatcccctgacattcccagggtcagccaggacctgttacagccctggtcacttggaactgacagctgtgtgaggcctgcacttctcagacccagacttagaacaaaaggaggagtgaggactcaaggctacaatgaggttccagtacttgttacaagaaattggttttctgcaaaaaaagtccctacctgagcctttaggtgaatgtgggatccactcccgcttttaacatgaaagcattagaagatgtgtggtgtttataaaaaaaaaaaaaaaaaaa

SEQ ID NO: 391 - DNA, 826 bp, Homo sapiens
  SITE (4): n equals a,t,g, or c
  SITE (5): n equals a,t,g, or c
  SITE (15): n equals a,t,g, or c
  SITE (810): n equals a,t,g, or c
aaanncaacgccaanttcaatytagtctttrccgscgagamcaacgcggccacgtggagcatcctggctgtcctgtgcctgcttgtggtcgtggcggtggccataggctgggtgtgcagggaccgatgcctccaacacagctatgcaggtgcctgggctgtgagtccggagacagagctcactggccacgtttgaccggagctcaccgcccagagcgtggacagggcttccatgagacgccaccgtgagaggccaggtggcagcttgagcatggactcccagactgcaggggagcacttggggcagcccccagaaggaccactgctggatcccagggagaacctgctggcgttggctgtgatcctggaatgaggccctttcaaaagcgtcatccacaccaaaggcaaatgtccccaagtgagtgggctccccgctgtcactgccagtcacccacaggaagggactggtgatgggctgtctctacccggagcgtgcgggattcagcaccaggctcttcccagtaccccagacccactgtgggtcttcccgtgggatgcgggatcctgagaccgaagggtgtttggtttaaaaagaagactgggcgtccgytcttccaggacggcctctgtgcttgctggggtcacgcgaggctgtttgcaggggacacggtcacaggagctcttctgccctgaacgttccaacctggcttccggccggaagccacaggacccactcatgtgtgtgcccacaagtgtagttagcccgtccacacccgaggaacccccggaagtcccactgggctttaagggnccttctggccacaatt

SEQ ID NO: 392 - DNA, 2114 bp, Homo sapiens
  SITE (2003): n equals a,t,g, or c
  SITE (2078): n equals a,t,g, or c
  SITE (2091): n equals a,t,g, or c
  SITE (2095): n equals a,t,g, or c
ggcagagtagagccgatctcccgcgccccgaggttgctcctctccgaggtctcccgcggcccaagttctccgcgccccgaggtctccgcgccccgaggtctccgcggcccgaggtctccgcccgcaccatgcggctgggcagtcctggactgctcttcctgctcttcagcagccttcgagctgatactcaggagaaggaagtcagagcgatggtaggcagcgacgtggagctcagctgcgcttgccctgaaggaagccgttttgatttaaatgatgtttacgtatattggcaaaccagtgagtcgaaaaccgtggtgacctaccacatcccacagaacagctccttggaaaacgtggacagccgctaccggaaccgagccctgatgtcaccggccggcatgctgcggggcgacttctccctgcgcttgttcaacgtcaccccccaggacgagcagaagtttcactgcctggtgttgagccaatccctgggattccaggaggttttgagcrttgaggttacactgcatgtggcagcaaacttcagcgtgcccgtcgtcagcgccccccacagcccctcccaggatgagctcaccttcacgtgtacatccataaacggctaccccaggcccaacgtgtactggatcaataagacggacaacagcctgctggaccaggctctgcagaatgacaccgtcttcttgaacatgcggggcttgtatgacgtggtcagcgtgctgaggatcgcacggacccccagcgtgaacattggctgctgcatagagaacgtgcttctgcagcagaacctgactgtcggcagccagacaggaaatgacatcggagagagagacaagatcacagagaatccagtcagtaccggcgagaaaaacgcggccacgtggagcatcctggctgtcctgtgcctgcttgtggtcgtggcggtggccataggctgggtgtgcagggaccgatgcctccaacacagctatgcaggtgcctgggctgtgagtccggagacagagctcactggccacgtttgaccggagctcaccgcccagagcgtggacagggcttccatgagacgccaccgtgagaggccaggtggcagcttgagcatggactcccagactgcaggggagcacttggggcagcccccagaaggaccactgctggatcccagggagaacctgctggcgttggctgtgatcctggaatgaggccctttcaaaagcgtcatccacaccaaaggcaaatgtccccaagtgagtgggctccccgctgtcactgccagtcacccacaggaagggactggtgatgggctgctctaccggaagcstkcgggattyaagcaccaggstctttccagtaccccagacccactgtgggtctttcccgtgggatgsgggatccttgagaccgaaaggtgtttggtttaaaaagaarcttgggcgtccgctyttycaggacgggcctctgtgctgctggggtcacgcgagacttgtttgcaggggacacggtcacaggagctcttctgccctgaacgctcccaacctgcctcccgcccggaagccacaggacccactcatgtgtgtgcccacaagtgtagttagccgtccacaccgaggagcccccggaagtccccactgggcttcagtgtcctctgccacattccctgggaggaacaatgtccctcggctgttccggtgaaaagttgagccacctttggaagacgcacgggtggagtttgccagaagaaaggctgtgccagggccgtgtttggctacaggggctgccggggctcttggctctgcagcgagaaagacacagcccagcagggctggagacgcccatgtccagcaggcgcaggcctggcaacacggtccccagagtcctgagcagcagttaggtgcatggagagggtatcacctggtggccacagtcccccttctcacctcagcaatgatccccaaagtgagaggtggctcccccggcccccaccaccctcngcagccccaccccactcaaccctgagggtccccagggtcctgatgaagacctccgaccccagcgccaggctcctnggagcgcaacagncccnaagaggcgggaatgtcccg

SEQ ID NO: 393 - DNA, 836 bp, Homo sapiens
  SITE (760): n equals a,t,g, or c
tatacgcccgctcgaaattaaccctcactaaagggaacaaaagctggagctccaccgcggtggcggccgctctagaactagtggatcccccgggctgcaggaattccctttcaagtcaacttcagatgtcactgacaaacttactatagactggacatatcgccctcccagcagcagccacacagtatcaatatttcattatcagtctttccagtacccaaccacagcaggcacatttcgggatcggattmctgggytggaaatgtatacaaaggggatgcatctataagtataagcaaccctaccataaaggacaatgggacattcagctgtgctgygaagaatcccccagatgtgcatcataatattcccatgacagagctaacagtcacagaaaggggttttggcaccatgctttcctctgtggcccttctttccatccttgkctttgtgccctcagccgtggtggttgctctgctgctggtgagaatggggaggaaggctgctgggctgaagaagaggagcaggtctggctataagaagtcatctattgaggtttccgatgacactgatcaggaggaggaagaggcgtgtatggcgaggctttgtgtccgttgcgctgagtgcctggattcagactatgaagagacatattgatgaaagtctgtatgacacaagaagagtcacctaaagacaggaaacatcccattccactggcagctaagcctgtcagagaaagtggagctggcctggaccatancgatggacaatcctggagatcatcagtaaaggacttttaggaacccacttaattattgaataaaatggttcttggt

SEQ ID NO: 394 - DNA, 541 bp, Homo sapiens
  SITE (44): n equals a,t,g, or c
aagcctggggtgtcctgaactctgcctgcttccccagccctgcnagtttccaaagaaggcgcttgaaaaggagaaacgaatcgctgctgctcttctaaaagccggttccctctctggtgtctgtggaccctgcttctraagtacatgaaaccttgagggaaaattgaccagttctagcagttctaaaatcatggctcgtgatttggtgatgttcagagatgtggctgtagacttttctcaggaagaatgggaatgcctgaactcatatcagaggaatttgtacagagatgtgatattagagaactatagcaacttggtgtcactgggatgttctatttctaagccagatgtgatcaccctattggaacaagggaaagagccctggrtggttgtgagggatgagaaaagaagatggactctaggccctaccttcaaataccatcaccttgggattcgtgtttcaacataggaattgttacgggaacacaaacattcagcccataacagattttatcaaagaagtacttcatgaaatgtaaaa

SEQ ID NO: 395 - DNA, 379 bp, Homo sapiens
cagtcaggggcttggtcaggcctgatcagccaagaggcggccccccaccaggaagacgggcttcccatggggctgacaagccgtacacctgccccgaatgtggcaaaggcttcagcaagacgtcccacttgaccaagcaccagcgcacacacacgggcgagcggccttacaagtgcctagtctgtgggaagggctttagcgaccgstccaacttcagcacgcaccagagggtgcacacaggcgagaagccctacccgtgccccgagtgtgggaagcgcttcagccagagctccagcctggtcatccaccgcaggacacacagcggggagcggccctatgcctgcacccagtgcgggaagcgcttcaacaacagctcgcg

SEQ ID NO: 396 - DNA, 1493 bp, Homo sapiens
  SITE (1384): n equals a,t,g, or c
  SITE (1484): n equals a,t,g, or c
  SITE (1485): n equals a,t,g, or c
  SITE (1490): n equals a,t,g, or c
  SITE (1493): n equals a,t,g, or c
ggcacgaggtgttccagtagaatgtccccaacctgagaaaatccccaatggaatcattgatgtgcaaggccttgcctatctcagcacagctctctatacctgcaagccaggctttgaattggtgggaaatactaccaccctttgtggagaaaatggtcactggcttggaggaaaaccaacatgtaaagccattgagtgcctgaaacccaaggagattttgaatggcaaattctcttacacggacctacactatggacagaccgttacctactcttgcaaccgaggctttcggctcgaaggtcccagtgccttgacctgtttagagacaggtgattgggatgtagatgccccatcttgcaatgccatccactgtgattccccacaacccattgaaaatggttttgtagaaggtgcagattacagctatggtgccataatcatctacagttgcttccctgggtttcaggtggctggtcatgccatgcagacctgtgaagagtcaggatggtcaagttccatcccaacatgtatgccaatagactgtggcctccctcctcatatagattttggagactgtactaaactcaaagatgaccagggatattttgagcaagaagacgacatgatggaagttccatatgtgactcctcaccctccttatcatttgggagcagtggctaaaacctgggaaaatacaaaggagtctcctgctacacattcatcaaactttctgtatggtaccatggtttcatacacctgtaatccaggatatgaacttctggggaaccctgtgctgatctgccaggaagatggaacttggaatggcagtgcaccatcctgcatttcaattgaatgtgacttgcctactgctcctgaaaatggctttttgcgttttacagagactagcatgggaagtgctgtgcagtatagctgtaaacctggacacattctagcaggctctgacttaaggctttgtctagagaatagaaagtggagtggtgcctccccacgctgtgaagccatttcatgcaaaaagccaaatccagtcatgaatggatccatcaaaggaagcaactacacatacctgagcacgttgtactatgagtgtgaccccggatatgtgctgaatggcactgagaggagaacatgccaggatgacaaaaactgggatgaggatgagcccatttgcattcctgtggactgcagttcacccccagtctcagccaatggccaggtgagaggagacgagtacacattccaaaaagagattgaatacacttgcaatgaagggttcttgcttgagggagccaggagtcgggtttgtcttgccaatggaagttggagtggagccactcccgactgtgtgcctgtcagatgtgccacnccgccacaactggccaatggggtgacggaaggcctggactatggcttcatgaaggaagtaacattccactgtcacgagggctacatcttgcacggtgctnnaaagnacn

SEQ ID NO: 397 - DNA, 702 bp, Homo sapiens
  SITE (587): n equals a,t,g, or c
  SITE (661): n equals a,t,g, or c
  SITE (670): n equals a,t,g, or c
gagaaagagacaaagagcccctacaggaacgctttttccgaccacatttcctgcaggctcctggggatatggtagctcatgaggggcgcctctgtcggctggactgtaaggtgagtggtttacgcccccggagctgacatggctactcaatggccaacctgtgctaccagatgcctcccacaagatgctggtcagggagaccggagtccactctctgctcattgacccactcactcagcgcgacgagggacctataagtgcatcgctaccaacaaaaccgggcagaattcttttagtctggagctctctgtagtagccaaagaggtgaagaaagcacctgtgatcctggagaaactacagaactgcggtgttcccgaaggccaccccgtgagactggagtgccgcgtgataggcatgcccccacctgtgttctactggaagaaagacaatgagaccatcccttgcaccagagagaggatcagtatgcaccaggacacaacagggtatgcctgccttctcattcagccagccaagaaatcagacgctggatggtacacgttgtcagccaagaatgaagccggcatcgngtcgtgcactgccaggctggatatatacgctcagtggcaccatcagatcccacsgccatgtctgccggcccagnggcagtcgntacggatctctaacagtaaaggacttgacata

SEQ ID NO: 398 - DNA, 494 bp, Homo sapiens
  SITE (366): n equals a,t,g, or c
ggcacgagtgaaggaatttctggactcactggcctctaaggggccagaagcccttcaggagttccagcagacagccaccactaccatggtgtaccaacagggtgggaactgcatatacacagacagcactgaagtggctgggtctttgcttgaacttgcctgtccagtcaccaccagtgttcagccacaaacccagcaagaacagcagatccaggttcagcagccgcagcaggttcaggtccaggtgcaggtacagcagtctccgcaacaggtctcggctcarctctccccacaactcaccgttcaccagcctactgagcaacccatccaggtccaggtgcagatccaaggccaggcaccacagtnagcagccccctccattcagaaccccgtctctgacagagtcccagtccctcgtcagctgcaacagcttcagaatccaggtggcagcacgtgcaagcagcccagcagatccaggctgcagaaatcccggt

SEQ ID NO: 399 - DNA, 2191 bp, Homo sapiens
  SITE (2188): n equals a,t,g, or c
  SITE (2189): n equals a,t,g, or c
ggttaagacaattgaacttgaaggaggtcttttggaagatcactttgaaactactgtaaaaatgagtacataccttgtagcctacatagtttgtgatttccactctctgagtggcttcacttcatcaggggtcaaggtgtccatctatgcatccccagacaaacggaatcaaacacattatgctttgcaggcatcactgaagctacttgatttttatgaaaagtactttgatatctactatccactctccaaactggatttaattgctattcctgactttgcacctggagccatggaaaattggggcctcattacatatagggagacgtcactgctttttgaccccaagacctcttctgcttccgataaactgtgggtcaccagagtcatagcccatgaactggcgcaccagtggtttggcaacctggtcacaatggaatggtggaatgatatttggcttaaggagggttttgcaaaatacatggaacttatcgctgttaatgctacatatccagagctgcaatttgatgactattttttgaatgtgtgttttgaagtaattacaaaagattcattgaattcatcccgccctatctccaaaccagcggaaaccccgactcaaatacaggaaatgtttgatgaagtttcctataacaagggagcttgtattttgaatatgctcaaggattttctgggtgaggagaaattccmgaaaggaataattcagtacttaaagaagttcagctatagaaatgctaagaatgatgacttgtggagcagtctgtcaaatagttgtttagaaagtgattttacatctggtggagtttgtcattcggatcccaagatgacaagtaacatgctcgcctttctgggggaaaatgcagaggkcaaagagatgatgactacatggactctccagaaaggaatccccctgctggtggttaaacaagacgggtgttcactccgactgcaacargagcgcttcctccagggggttttccaggaagaccctgaatggagggccctgcaggagaggtacctgtggcatatcccattgacctactccacgagttcttctaatgtgatccacagacacattctaaaatcaaagacagatactctggatctacctgaaaagaccagttgggtgaaatttaatgtggactcaaatggttactacatcgttcactatgagggtcatggatgggaccaactcattacacagctgaatcagaaccacacacttctcagacctaaggacagagtaggtctgattcatgatgtgtttcagctagttggtgcagggagactgaccctagacaaagctcttgacatgacttactacctccaacatgaaacaagcagccccgcacttctcgaaggtctgagttacttggaatcgttttaccacatgatggacagaaggaatatttcagatatctctgaaaacctcaagcgttaccttcttcagtattttaagccagtgattgacaggcaaagctggagtgacaagggctcagtctgggacaggatgctccgctcggctctcttgaagctggcctgtgacctgaaccatgctccttgcatccagaaagctgctgaactcttctcycagtggatggaatccagtggaaaattaaatataccaacagatgttttaaagattgtgtattctgtgggtgctcagacaacagcaggatggaattaccttttagagcaatatgaactgtcaatgtcaagtgctgaacaaaacaaaattctgtatgctttgtcaacgagcaagcatcaggaaaagttactgaagttaattgaactaggaatggaaggaaaggttatcaagacacagaacttggcagctctccttcatgcgattgccagacgtccaaaggggcagcaactagcatgggattttgtaagagaaaattggacccatcttctgaaaaaatttgacttgggctcatatgacataaggatgatcatctctggcacaacagctcacttttcttccaaggataagttgcaagaggtgaaactattttttgaatctcttgaggctcaaggatcacatctggatatttttcaaactgttctggaaacgataaccaaaaatataaaatggctggagaagaatcttccgactctaaggacttggctaawggktaawacttaaawgggcaaaaaaaaaaannaa

SEQ ID NO: 400 - DNA, 1255 bp, Homo sapiens
agcccagccaggctgcccttcttccctgcggagggagggcctgggcgktcgcgttggcgggagggaggttacctttcccagtctcgctctggccgcctgagccaggaggaagcagcggcgaggtctgcgggaggcatggcgggagctccggacgagcgccggcggggccccgcggcaggggagcagctgcagcagcaacacgtctcttgccaggtcttccccgagcgtctggcccaggggaatccccagcaagggttcttctccagcttcttcaccagcaaccagaagtgccagcttaggctcctgaagacgctggagacaaatccatatgtcaaacttctgcttgatgctatgaaacactcaggttgtgctgttaacaaagatagacacttttcttgcgaagactgtaatggaaatgtcagtggaggttttgatgcttcaacatctcagatagttttgtgccagaataatatccataatcaggcccatatgaacagagtggtcacacacgagcttattcatgcatttgatcattgtcgtgcccatgtcgactggttcaccaacatcagacatttggcgtgctcagaggttcgagctgctaaccttagtggagactgctcacttgtcaatgaaatattcaggttacattttggattaaaacaacaccaccagacttgtgtgcgagacagagccactctttctatcctggctgttaggaatatcagcaaagaagtagctaaaaaggctgttgatgaagtttttgaatcttgtttcaatgaccatgaaccttttggaaggatcccacataacaagacttatgcaagatatgctcacagagactttgaaaaccgtgatcggtattattcaaatatatgagcacaatgacatttttatattacagagcttccatcatcatgaagaaaaaaaaatttggttctcaagtgaacaaacatataaaatgtaaacaatccctacaatccagataaaacagagaagactgtgattctagcatattatcagaaaaagtaactatggcaaaaaatgaaactgctttaaactccaaggcagaaattgtatctttatagctaaccatttagtaaataaatacattacatttttgtattttagtcatttgtttttattacatgtgattattttaaaatttgattatgaaacctgtgaagtgtgctcttccatgatgttgataggtgaccactgttggtatttacattaaatgtaaagaaatgtgaaaaaa

SEQ ID NO: 401 - DNA, 683 bp, Homo sapiens
taaattgcccggccgcgtccgacaattttaaatccgactcacctatagggcaaaactttttttttttttttttttttttcrgagtgaaaaagacgctgtatttgatttacaatgaacaagatttacaaaaaggggtggggtggtcttggaactgctcccagtccccccggactgggtggggctctagggcagcctgtctgacagaccaggaccccaggatgtctgggccccgacgtaggacttgacctacgtctcacttgacctttgacgtggggcccagcagccgtgagtccacccagagtgccggcacccttggggaggccggtgaggtcaggaaggcatcgtaccgctttttctcctcctcccatctcgtggtggacagacagacataggatctgggaacttgccctgggggccacaggccctcagatcccccaggggcccaacctagggcatggaggcggctgctggtgcgtgggcggaggcggaggccagctgcccccagcgtggcagcgtaaggcacattttcaaatcactcgagactcgacagtgaacacccgatgctggttctgcggccggatgtccagcttgccggtgatcattacgtccttgtcgccgtccttggagggcagggagaaaaagccgtcggtgtaggttctgtagccagcacggggatgcccggc

SEQ ID NO: 402 - DNA, 550 bp, Homo sapiens
  SITE (1): n equals a,t,g, or c
  SITE (524): n equals a,t,g, or c
  SITE (534): n equals a,t,g, or c
  SITE (537): n equals a,t,g, or c
ntttcgaggactcaccaatctggttcggctaaacctttcggggaatttgttttcttcattatctcaaggaacttttgattatcttgcgtcattacggtctttggaattccagactgagtatcttttgtgtgactgtaacatactgtggatgcatcgctgggtaaaggagaagaacatcacggtacgggataccaggtgtgtttatcctaagtcactgcaggcccaaccagtcacaggcgtgaagcaggagctgttgacatgcgaccctccgcttgaattgccgtctttctacatgactccatctcatcgccaagttgtgtttgaaggagacagccttcctttccagtgcatggcttcatatattgatcaggacatgcaagtgttgtggtatcaggatgggagaatagktgaaaccgatgaatcgcaaggtatttttgttgaaaagaacatgattcacaactgctccttgattgcaagtgccctaaccatttctaatattcaggctggatctactggaaattggngctgcatgtncanaccaacgtgggaa

SEQ ID NO: 403 - DNA, 278 bp, Homo sapiens
  SITE (11): n equals a,t,g, or c
  SITE (12): n equals a,t,g, or c
cagccaggaannrttacgtgttccaggtacaggccatgaattcagctggtctggggcaaccgtccatgcccactgatcccgtgctcctggaggacaagccaggtgcccatgagatcgaggttggtgtggatgaagagggctttatctatttggcttttgaagcccctgaagcccccgactcctcagagtttcagtggtccaaagactacaagggcccactggacccccagagggtcaagatcgaggataaagttaacaagtccaaggtcatcctgaaa

SEQ ID NO: 404 - DNA, 1355 bp, Homo sapiens
  SITE (44): n equals a,t,g, or c
  SITE (55): n equals a,t,g, or c
  SITE (126): n equals a,t,g, or c
  SITE (132): n equals a,t,g, or c
  SITE (164): n equals a,t,g, or c
  SITE (1346): n equals a,t,g, or c
ggagataattttttaattccagcaaaagcggcacttcccttcgntccaggatgtnaatgttccagccggagatcagtttgatcactgggtttctgatctcatgactcagttcttcagttctccagntcttcntcggtaagcgtgtggcttgcggagatgtcttnatcggcatcagtgactatgactgagtaggtgcccaaatcctcgaggccggttctttcaggatgaccttggacttgytaactttatcctcgatcttgaccctctgggggtccagtgggcccttgtagtctttggaccactgaaactctgaggagtcgggggcttcaggggcttcaaaagccaaatagataaagccctcttcatccacaccaacctcgatctcatgggcacctggcttgtcctccaggagcacgggatcagtgggcatggacggttgccccagaccagctgaattcatggcctgtacctggaacacgtaactctttcctggctgcaagtcggaaaccctcaggtgggtgccagagatggggcctggggtgaccggcttccactgctcagagccttcctcctggaaactgacgtgatagcctgtgacaggcccagcccccatatacagtgggggttcccactgcagcaccagggatgtagcccgcacctcggatgcccgtacatcgtacggggggcctggctggggcattgtccactctttgcactcaaacaggctgctgggtgccgacagctcgccaacacctgcccagttggcagcccgggcacggaactcatagaagtggccttcatgaaggtcactgaccttgcagacccgggtggggatgggctcgtgccgaattcctgcagcccgggggatccactagttctagagcggccgccaccgcggtggagctccagcttttgttccctttagtgagggttaatttcgagcttggcgtaatcatggtcatagctgtttcctgtgtgaaattgttatccgctcacaattccacacaacatacgagccggaagcataaagtgtaaagcctggggtgcctaatgagtgagctaactcacattaattgcgttgcgctcactgcccgctttccagtcgggaaacctgtcgtgccagctgcattaatgaatcggccaacgcgcggggagaggcggtttgcgtattgggcgctcttccgcttcctcgctcactgactcgctgcgctcggtcgttcggctgcggcgagcggtatcagctcactcaaaggcggtaataccggtatycacagaatmaggggataccaggaaagaacatgtgagcaaaaggccagcaaaaggccaggaacccgtaaaaaggcccncgttgctgg

SEQ ID NO: 405 - DNA, 290 bp, Homo sapiens
  SITE (280): n equals a,t,g, or c
  SITE (287): n equals a,t,g, or c
aaaaacccaagatggataaaatattggaatcaagcatattcctgcaacccagtgtggcatttgggttcgaaccagcaatggaggtcattttgcttcgccaaattatcctgactcatatccaccaaacaaggagtgtatctacattttggaagctgctccacgtcaaagaatagagttgacctttgatgaacattattatatagaaccatcatttgagtgtcggtttgatcacttggaagttcgagatgggccatttggtttctctcctcttatagatcgntactgcnggc

SEQ ID NO: 406 - DNA, 559 bp, Homo sapiens
  SITE (525): n equals a,t,g, or c
  SITE (556): n equals a,t,g, or c
  SITE (557): n equals a,t,g, or c
  SITE (558): n equals a,t,g, or c
gggtcgacccacgcgtccggatccccacccctgcccacccctgccctacgctggaccaaggacttcgtccccctggggaatggccccaccctctccctgagctccctcaccttcgactctgcgggcacctacgtctgtgaggcctccatgcccacggtccccctcctcagccgtacccagagcttcaagctgctggtccaagggccacctcaattaagtgcagaagagactcagccccagacagagggcggctggagggaaggagatgaagttaggctggtgtgctctgcccgcggttacccggagcccaaactyagctggagccaattgggtggcagcccagcagaaccggcctcactgggcagggctgggtgagcagytccctgaccytgaagktgaccagcgccytgagcagagaaggcgtctyctgcgaggyttccaacacccasgggaagaagcagcatgtyttccatttggstctgtgggcccccagayttcccaggccggcgtggctgtcatggccgnggccgtcagcgtgggcctcttgcttctcgcnnng

SEQ ID NO: 407 - DNA, 734 bp, Homo sapiens
  SITE (668): n equals a,t,g, or c
  SITE (677): n equals a,t,g, or c
  SITE (680): n equals a,t,g, or c
gctgtgaattaaaatatggaggctttgttgtgagaagaactactgaattaactgttacagcccctctgactgataagccacccaagcttttgtatcctatggaaagtaaactgacaattcaggagacccagctgggtgactctgctaatctaacctgcagagctttctttgggtacagcggagatgtcagtcctttaatttactggatgaaaggagaaaaatttattgaagatctggatgaaaatcgagtttgggaaagtgacattagaattcttaaggagcatcttggggaacaggaagtttccatctcattaattgtggactctgtggaagaaggtgacttgggaaattactcctgttatgttgaaaatggaaatggacgtcgacacgccagcgttctccttcataaacgagagctaatgtacacagtggaacttgctggaggccttggtgctatactcttgctgcttgtatgtttggtgaccatctacaagtgttacaagatagaaatcatgctcttctacaggaatcattttggagctgaagasctcgatggagacaataaagattatgatgcatacttatcatacaccaaaagtggatcctgaccagtggaatcaagagactgggggaagaagaaccgttttggccttgaaatcctacctganatgcttganagnccttatggatataagtggttatcccagattgagatttaatcccactggaacata

SEQ ID NO: 408 - DNA, 764 bp, Homo sapiens
  SITE (659): n equals a,t,g, or c
  SITE (690): n equals a,t,g, or c
gcgkccgcgctgctggcgrsmtccggctccggaggtctgtgcggccctcaatgtcactgtgtccccggggcccgtggttgactacctggagggggagaatgccactctcctctgccacgtctcccagaaaaggcggaaggacagcttgctggccgtgcgctggttctttgcacactcctycgactcccaggaggccttgatggtgaagatgaccaagctccgggtggtgcagtactatgggaatttcagccgcagcgccaaacggcggaggctgcgcctgctggaggagcagcggggggcgctctacaggctctccgtcttgacactgcagccctccgatcaagggcattacgtctgcagagtccaggaaatcagcaggcacaggaacaagtggacggcctggtccaatggctcctcagccacggaaatgagagtcatttccctcaaagcttctgaagagtcatcctttgagaaaacaaaagagacttgggcattttttgaagatctctatgtgtatgctgtcctcgtgtgctgcrtggggatcctcasattctgctcttcatgctggtcatcgtctggcagtctgtgtttaacaagcggaaatccagagtgagacattatttggtgaaatgccctcagaacagctcaggggagagctnactagcgtgaccagcttggccccactacaknccaagaagggcaagaggcagaaggagaagcctgacattyctcgcagtccctgscaaarctccgatagcccccac

SEQ ID NO: 409 - DNA, 1273 bp, Homo sapiens
aacttccactttgtaaaggcagaccagtttgctcccagaaaatcaatatctgcttccaatttggaccctttccaataaaccataaactctcatgagtctttgggaacattactgtagggctaagttggtggacaaatatttggtttttaaagttattgcaatgaaagccttaaatagtgaagaaattttcattttgaaaatgcagactggctttagcatgaatgtcaacacagagcatttgtgtagcaatttacagttgctagaactggcaagattcattatcccattttaccctcaagaattctatgggaagttaagtcgtctttacacaaacatggagtctgaggtcattaggggataagaaatttagccaagttcacacagctatatagagggcacaactcataccccagctgtgtttaaaatagataatttatcatatatacatggtccactacatagtcaaacaatttctatagtgggcagtaaatagccacccagactatactcacatcaagaaatgtcctcaataacacagttgacaggatggtgctttcagaatggatcccctgccagtaagtccaagattcctgtgtcccaaaggtccacagagcaacttccccatgcaccctgacccccattcaaacccattagaattcacacacaaggttgcaatgggcaaggcacttggcaagaggagggtcttcagaacacactttccagcttggcgtgtacttcccactctcctaccctgagggcacctggcagcagacaccctcaggggctgaatcagaggtgactgagcttggcacacagtgaagaggcccatgcgctccagtgtgtcttctgatggccaacacctgtgctcctttggaaaagggtgagtaagcacttcttagagagtgtgtttctctatcagtacaggtccaccttgtgaaarggctggaagccctctagaatggtgttcttctytgtctgcggcctcagggtctcataggtgggcaccatggcattcagagacagaccttatacttctctagtcagtctgcccctctggccttaatcttcagggttagtgcatctatttaaaacaagagatgccatctcaggtggtgctggcaatcagcagttgctgtggscctgcaatgccatctgatccttggaaaaccaacatatgtgccatcttacagttgggtccataatggcatttcctctagctatatactgtgagcttgtatcgtggatacaggaagagtagagagtaaaattaatg

SEQ ID NO: 410 - DNA, 1168 bp, Homo sapiens
  SITE (9): n equals a,t,g, or c
  SITE (21): n equals a,t,g, or c
  SITE (1168): n equals a,t,g, or c
gggtcctgncagttgggcagnaactccattccggcagattgaggtgggggccttcaacggcctggccagcctcaacaccctggagctgttcgacaactggctgacagtcatccctagcggggcctttgaatacctgtccaagctgcgggagctctggcttcgcaacaaccccatcgaaagcatcccctcttacgccttcaaccgggtgccctccctcatgcgcctggacttgggggagctcaagaagctggagtatatctctgagggagcttttgaggggctggttaacctcaagtatctgaacttgggcatgtgcaacattaaagacatgcccaatctyaccccctggtggrctggcaggagctggagatgtcagggaaccacttccctgagatcaggcctggctccttccatggcctgagctccctcaagaagctctgggtcatgaactcacaggtcagcctgattgagcggaatgcttttgacgggctggcttcacttgtggaactcaacttggcccacaataacctctcwtctttgccccatgacctctttaccccgctgaggtacctggtggagttgcatctacaccacaacccttggaactgtgattgtgacattctgtggctagcctggtggcttcgagagtatatacccaccaattccacctgctgtggccgctgtcatgctcccatgcacatgcgaggccgctacctcgtggaggtggaccaggcctccttccagtgctctgcccccttcatcatggacgcacctcgagacctcaacatttctgagggtcggatggcagaacttaagtgtcggactccccctatgtcctccgtgaagtggttgctgcccaatgggacagtgctcagccacgcctcccgccacccaaggatctctgtcctcaacgacggcaccttgaacttttcccacgtgctgctttcagacactggggtgtacacatgcatggtgaccaatgttgcaggcaactccaacgcctcggcctacctcaatgtgagcacggctgagcttaacacctccaactacagcttcttcaccacagtaacagtggagaccacggagatctcgcctgaggacacaacgcgaaagtacaagcctgttcctaccacgtccactggttaccagccggcatataccacctctn

SEQ ID NO: 411 - DNA, 578 bp, Homo sapiens
gcggccgcctggagctctcggcctcggccttcgacgacggcaacttctcgctgctcatccgcgcggtggaggagacggacgcggggctgtacacctgcaacctgcaccatcactactgccacctctacgagagcctggccgtccgcctggaggtcaccgacggccccccggccacccccgcctactgggacggcgagaaggaggtgctggcggtggcgcgcggcgcacccgcgcttctgacctgcgtgaaccgcgggcacgtgtggaccgaccggcacgtggaggaggctcaacaggtggtgcactgggaccggcagccgcccggggtcccgcacgaccgcgcggaccgcctgctggacctctacgcgtcgggcgagcgccgcgcctacgggcccctttttctgcgcgaccgcgtggctgtgggcgcggatgcctttgagcgcggtgacttctcactgcgtatcgagccgctggaggtcgccgacgagggcacctactcctgccacctgcaccaccattactgtggcctgcacgaacgccgcgtcttccacctgacggtcgccgaaccccacgcggag

SEQ ID NO: 412 - DNA, 532 bp, Homo sapiens
  SITE (500): n equals a,t,g, or c
  SITE (507): n equals a,t,g, or c
  SITE (518): n equals a,t,g, or c
gctgagatgcaagtctgactttgccacatttatagcaaagtgatgctgagtcactaagcctctttttctccattgtgaaaggttcttccagtctagagctccatgattatgcacgggcagctggttcaaacacctatccattctgaagattagtgtttgggagaatgtatagcttagagactggtaatgtattttattacttccttcccaagatcttgctgctattcccgactttcagtctggtgctatggaaaactggggactgacaacatatagagaatctgctctgttgtttgatgcagaaaagtcttctgcatcaagtaagcttggcatcacaatgactgtggyccatgaactggcccaccaggtataagctcattcacacttttaataaagtataaactacatttatattgcttctatgggacatataaggctatttatataawttttactttgtctttttttaataggaaaaawtggttttccaaagcattcgntttatgncttataatgcntgttgaaccttttt

SEQ ID NO: 413 - DNA, 735 bp, Homo sapiens
  SITE (728): n equals a,t,g, or c
  SITE (731): n equals a,t,g, or c
gacaacgtccagccgttccttcaagcactcccgctctgctgccgtcacctcagagttccacttggtgcctagccgcagcatgaatgggcagccactgacttgtgtggtgtcccatcctggcctgctccaggaccaaaggatcacccacatcctccacgtgtccttccttgctgaggcctctgtgaggggccttgaagaccaaaatctgtggcacattggcagagaaggagctatgctcaagtgcctgagtgaagggcagccccctccctcatacaactggacacggctggatgggcctctgcccagtggggtacgagtggatggggacactttgggctttcccccactgaccactgagcacagcggcatctacgtctgccatgtcagcaatgagttctcctcaagggattctcaggtcactgtggatgttcttgacccccaggaagactctgggaagcaggtggacctagtgtcagcctcggtggtggtggtgggtgtgatcgccgcactcttgttctgccttctggtggtggtggtggtgctcatgtcccgataccatcggcgcaaggcccagcagatgacccagaaatatgaggaggagctgaccctgaccagggagaactccatccggaggctgcattcccatcacacggaccccaggagccarccggaggaragtgtagggctkaragccgagggccaccctgatagtctyaaggrcaacaatngtntttg

SEQ ID NO: 414 - DNA, 543 bp, Homo sapiens
  SITE (525): n equals a,t,g, or c
  SITE (530): n equals a,t,g, or c
gctgatgcaagggaagctggcttccaggtcaaggcctacactttcagtgaacccttccacctgattgtgtcctatgaactgtttccagcgccaattctcagagctgtaccctcagctgaaccccaagcaggaagccccatgaccctgagttgtcagacaaagttgcccctgcagaggtcagctgcccgcctcctcttctccttctacaaggatggaaggatagtgcaaagcagggggctctcctcagaattccagatccccacagcttcagaagatcactccgggtcatactggtgtgaggcagccactgaggacaaccaagtttggaaacagagcccccagctagagatcagagtgcagggtgcttccagctctgctgcacctcccacattgaatccagctcctcagaaatcagctgctccaggaactgctcctgaggaggcccctgggcctctgctccgcgcaaccccatcttctgaggatccaggcttttcttctcctctggggatgccagacctcatctgnatcancagatgggccttt

SEQ ID NO: 415 - DNA, 786 bp, Homo sapiens
  SITE (692): n equals a,t,g, or c
  SITE (747): n equals a,t,g, or c
  SITE (757): n equals a,t,g, or c
  SITE (783): n equals a,t,g, or c
tttttttttttttttttttttttttttttttttttttctcataaaagagaataggactttattagcattggtgcagacattgtattacacaggaatgggtccctagcttgcacaaccccagctgagctttcagcagataaatcacagcagaaatagaatcaccctaggactttcaatcaaaagctggaagtccaccttacagaaagacaaaaagaaacccctttttatatcttaacaaagcaatagctctcaagcagcagagcatctcgaggaagaaagcttgcccggtcgccatcccatcatgccagagcgtgcagtgtccacccttgactacgctggggaattgctgattttttgaaaaagcttaacttaacaatttctgatgtctatcttttagagttctgtatgttcccattttttattcttctgaattttgaattgcaagtagctgtaaaatccaatctttgagtgcatggggcctggcaggtggtgtgggcatcccagcccctgggcaccagggtcagcagctggggcgtgtgctgctccacaaattgcttgcacttttccctgtccagccaggagtggctggtttttcctgagcccagccctgggaggtcgtggtaggtgtggaggctgcagagctcctccagatgctgccctcgctgtgcctcacaccagagaggatggaagtnggctctggtgtcagactgtggttgagctgagacagacaaagccgacacagggctnggggcccgtngtccaccagtggaagtgactgccgangaa

SEQ ID NO: 416 - DNA, 690 bp, Homo sapiens
  SITE (675): n equals a,t,g, or c
  SITE (676): n equals a,t,g, or c
ggacccgccaggcagccaaggagaaagcagatgccatctatgatatgattggtttcccagactttatcctggagcccaaagagctggatgatgtttatgacgggtacgaaatttctgaagattctttcttccaaaacatgttgaatttgtacaacttctctgccaaggttatggctgaccagctccgcaagcctcccagccgagaccagtggagcatgaccccccagacagtgaatgcctactaccttccaactaagaatgagatcgtcttccccgctggcatcctgcaggcccccttctatgcccgcaaccaccccaaggccctgaacttcggtggcatcggtgtggtcatgggccatgagttgacgcatgcctttgatgaccaagggcgcgagtatgacaaagaagggaacctgcggccctggtggcagaatgagtccctggcagccttccggaaccacacggcctgcatggaggaacagtacaatcaataccaggtcaatggggagaggctcaacggccgccagacgctgggggagaacattgctgacaacggggggctgaagctgcctacaatgcttacaaagcatggctgagaaagcatggggaggagcagcaaytgcagccgtggggsttamcaaccaccastyttcttcgtgggatttgccccaggtnntggtgctcggtccg

SEQ ID NO: 417 - DNA, 658 bp, Homo sapiens
  SITE (597): n equals a,t,g, or c
ggggaaatgcaagaagaattatcagggccgaccttggagtccaggctsctatctccccatccccaaaggcactgcaaatacctgtatccccagyatttccagtattggtacgaatgtctgcgacaacgagctcctgcactgccagaacggagggacgtgccacaacaacgtgcgctgcctgtgcccggccgcatacacgggcatcctctgcgagaagctgcggtgcgaggaggctggcagctgcggctccgactctggccagggcgcgcccccgcacggctccccagcgctgctgctgctgaccacgctgctgggaaccgcagccccctggtgttctaggtgtcacctccagccacaccggacgggcctgtgccgtggggaagcagacacaacccaaacatttgctactaacataggaaacacacacatacagacacccccactcagacagtgtacaaactaagaaggcctaactgaactaagccatatttatcacccgtggacagcacatccgagtcaagactgttaatttctgactccagaggagttcggcagctgttgatattatcactgcaaatcacattgccagctgcaganatattgtggattggaaaggctgcgacagcccccaaacagggaagacacaaaacacacacat

SEQ ID NO: 418 - DNA, 811 bp, Homo sapiens
  SITE (678): n equals a,t,g, or c
  SITE (772): n equals a,t,g, or c
  SITE (781): n equals a,t,g, or c
  SITE (792): n equals a,t,g, or c
aattcccgggtcgacccacgcgtccggcctttgctgctcctctctctgcacggtgttgcagcatccctggaagtgtcagagagccctgggagtatccaggtggcccggggtcagacagcagtcctgccctgcactttcactaccagcgctgccctcattaacctcaatgtcatttggatggtcactcctctctccaatgccaaccaacctgaacaggtcatcctgtatcagggtggacagatgtttgatggtgccccccggttccacggtagggtaggatttacaggcaccatgccagctaccaatgtctctatcttcattaataacactcagttatcagacactggcacctaccagtgcctggtcaacaaccttccagacatagggggcaggaacattggggtcaccggtctcacagtgttagttcccccttctgccccacactgccaaatccaaggatcccaggatattggcagcgatgtcatcctgctctgtagctcagaggaaggcattcctcgaccaacttacctttgggagaagttagacaataccctmaaactacctcaacagstactcaggaccaggtccagggaacagtcaccatccggaacatmagtgccctgtcttcaggtttgtaccaagtgcgtggcttctaatgctattggaaccagcacctgncttctggatctccaggttatttcaccccagcccaggaacattggactaatagctggagccattgcactggtgcagttattatcattttttgcantgcactaantttaagggcantcttttactgggagaagca

SEQ ID NO: 419 - DNA, 657 bp, Homo sapiens
cgagattccgggattggaatcaaaatgctaatttaaaaggtcaagtgaagctgctcctcacgttttggcgtgcctgcgctctctgcaggcagaagcgaacaaagacccagcaagagaaggcagaggctaagacccatcccgtatctgctctcctgaaataattctggagtcatgcctgaaatgccagaggacatggagcaggaggaagttaacatccctaataggagggttctggttactggtgccactgggcttcttggcagagctgtacacaaagaatttcagcagaataattggcatgcagttggctgtggtttcagaagagcaagaccaaaatttgaacaggttaatctgttggattctaatgcagttcatcacatcattcatgattttcagccccatgttatagtacattgtgcagcagagagaagaccagatgttgtagaaaatcagccagatgctgcctctcaacttaatgtggatgcttctgggaatttagcaaaggaagcagctgctgttggagcatttctcatctacattagctcagattatgtatttgatggaacaaatccmccttacagagaggaagactaccagctyccctaaatttgtatggcaaaacaaaattagatggagaaaaaggctgtcctggaaaaa

SEQ ID NO: 420 - DNA, 1641 bp, Homo sapiens
gagccggtttcttgaagcagctggaagtcctggatagttcccacctgaaagtctgtttgcaaaggcaatgcgcactcaggcaccagagggcagaggggctcaagttccagggttttaaggtgcttggaactcccaggagcctggcaaaccttcatccagaacctcttcctcaagcaagacaaaaagctgctaagcactgctccctccgtctctgtgaagagaccagcttctaacagacggtgccgggctgaccccccatcatgccaggctggctcaccctccccacactctgccgcttccttctttgggccttcaccatcttccacaaagcccaaggagacccagcatcccacccgggcccccactacctcctgccccccatccacgaggtcattcactctcatcgtggggccacggccacgctgccctgcgtcctgggcaccacgcctcccagctacaaggtgcgctggagcaaggtggagcctggggagctccgggaaacgctgatcctcatcaccaacggactgcacgcccgggggtatgggcccctgggagggcgcgccaggatgcggagggggcatcgactagacgcctccctggtcatcgcgggcgtgcgcctggaggacgagggccggtaccgctgcgagctcatcaacggcatcgaggacgagagcgtggcgctgaccttgagcttggagggtgtggtgtttccgtaccaacccagccggggccggtaccagttcaattactacgaggcgaagcaggcgtgcgaggagcaggacggacgcctggccacctactcccagctctaccaggcttggaccgagggtctggactggtgtaacgcgggctggctgctcgagggctccgtgcgctaccctgtgctcaccgcacgcgccccgtgcggcggccgaggccggcccgggatccgcagctacggaccccgcgaccggatgcgcgaccgctacgacgccttctgcttcacctccgcgctggcgggccaagtgttcttcgtgcccggcggctgacgctgtctgaagcccacgcggcgtgccggcgacgcggcgccgtggtggccaaggttgggcacctctacgccgcctggaagttttcggggctagaccagtgcgacggcggctggctggctgacggcagtgtgcgcttcccaatcaccacgccgaggccgcgctgcggggggctcccggatcccggagtgcgcagtttcggcttccccaggccccaacaggcagcctatgggacctactgctacgccgagaattaggcgcccaccgtgtcccctccagcgcgcgcgaagaagcttgggagtcgtggcgggggtctctcgccacccctttccggagagcctcccctccctccagacccggagcggcctctccagacctgccttcccagccgggggctgcgggcctcggaccccggctggcccggcggcggggaggggaggcgggggcgcctccggcggcgagatgcagaggtgaccctcggacccgctgccgttcgcgaaccctagcagaggactcagccaccgccgaggggagggtgaggcggccgggggcattaactgacctctgagtacagcaataaaataacctggggatctttaaaaaaaaaaaaaaaaaa

SEQ ID NO: 421 - DNA, 1310 bp, Homo sapiens
cccacgcgtccggccaggcaggtgggcctcaggaggtgcctccaggcggccagtgggcctgaggccccagcaagggctagggtccatctccagtcccaggacacagcagcggccaccatggccacgcctgggctccagcagcatcagcagcccccaggaccggggaggcacaggtggcccccaccacccggaggagcagctcctgcccctgtccgggggatgactgattctcctccgccagccgtagggtgtgtgctgtccgggctcacggggaccctgtctccgagtcgttcgtgcagcgtgtgtaccagcccttcctcaccacctgcgacgggcaccgggcctgcagcacctaccgcaatatgccagccgccatgccggaacggagggagctgtgtccagcctggccgctgccgctgccctgcaggatggcggggtgacacttgccagtcagatgtggatgaatgcagtgctaggaggggcggctgtccccagcgctgcgtcaacaccgccggcagttactggtgccagtgttgggaggggcacagcctgtctgcagacggtacactctgtgtgcccaagggagggccccccagggtggcccccaacccgacaggagtggacagtgcaatgaaggaagaagtgcagaggctgcagtccagggtggacctgctggaggagaagctgcagctggtgctggccccactgcacagcctggcctcgcaggcactggagcatgggctcccggaccccggcagcctcctggtgcactccttccagcagctcggccgcatcgactccctgagcgagcagatttccttcctggaggagcagctggggtcctgctcctgcaagaaagactcgtgactgcccagcgccccaggctggactgagcccctcacgccgccctgcagcccccatgcccctgcccaacatgctgggggtccagaagccacctcggggtgactgagcggaaggccaggcagggccttcctcctcttcctcctccccttcctcgggaggctccccagaccctggcatgggatgggctgggatcttctctgtgaatccacccctggctacccccaccctggctaccccaacggcatcccaaggccaggtgggccctcagctgagggaaggtacgagctccctgctggagcctgggacccatggcacaggccaggcagcccggaggctgggtggggcctcagtgggggctgctgcctgacccccagcacaataaaaatgaaacgtgaaaaaaaaaaaaaaaaaaaaaaaaaaaaaaaaaaaaaaaaaaaaaaaaaaaa

SEQ ID NO: 422 - DNA, 554 bp, Homo sapiens
  SITE (496): n equals a,t,g, or c
gaattcggccttacggcacagtagagagcttccagggctggctggcgtgggatacccgtaccacagaaatgcagggaccattgcttcttccaggcctctgctttctgctgagcctctttggagctgtgactcagaaaaccaaaacttcctgtgcctcctcctggcggcctcacttttctcctgtgtaaagccatccagaacaccagcacctcactgcatctgcagctctcgctctgcctcttcctggcccacctcctcttcctcgtggggattgatcgaactgaacccaaggtgctgtgctccatcatcgccggtgctttgcatatctctacctggccgccttcacctggatgctgctggagggtgtgcacctcttcctcactgcacggaamctgacagtggtcaactactcaagcatcaatagactcatgaagtggatcatgttcccagtcggctatggcgttcccgctgtgactgtggccatttctgcagcctnctggcctcacctttatggaactgctgatcgatgctggcttcacctggaccagggattc

SEQ ID NO: 423 - DNA, 415 bp, Homo sapiens
  SITE (17): n equals a,t,g, or c
  SITE (41): n equals a,t,g, or c
  SITE (97): n equals a,t,g, or c
ctgagttctgagacatnccacactttcccagcaagatgggntcctgactcaaaccccagtgagggaratgccctccggacaagtgaagagaaaatantaaaactagaatattcaactccatatggaaaatcatatccatggatctctttggcattatgaagaatgaagctaaggaaaagggaattcattaaacatatcatccttggagaggaagtaatcaacctttacttcccaagctgtttgttctccacaataggctctcaacaaatgtgtgggaagggagggatgtgtgcatcctggaagagaagcaggctgtccctgaaggttctcaaaggttcagtgggaagaactcacgtgctcagcaaagctattgatgatgaccaagtgagagtaattctcctggcagaacatccgg

SEQ ID NO: 424 - DNA, 2241 bp, Homo sapiens
  SITE (3): n equals a,t,g, or c
  SITE (1201): n equals a,t,g, or c
ganggtcattttttttttttttttttttgaagagaaatgcaatttaccacacatttgttgagagcctattgtggagaacaaacagcttgggaagtaaaggttgattacttcctctccaaggatgatatgtttaatgaattcccttttccttagcttcattcttcataatgccaaagagatccatggatatgattttccatatggagttgaatattctagttttaatattttctcttcacttgtcctggaaaaacatccccctcactgggttttgagtcaggacccatcttgctggaaagtgtgtatgtctcagactcagattttgattttacgatctctctaaaccacttttgatattgtttctgracctgctggctgaggaggcagtagaccaagaagatgaagaagccttggaggctgttgatgatggtgaagaggtaggccatgacctgggcagctggacccacctgtagcaagcccagacaccatgtgcagcccaggatgaagagctgagctgttgctttgaaagccagcatccttgtgttctggatggttgacacttcactattgagggaggaaagttttcttttcaaaatccaaaagaccaagataaacaatactaaattcgcagagaaaatggcacagactgggccaaggaaactccacatgaatccctggtccaggtggagccagcatcgatcagcagttccataaaggtgaggccaggaggctgcagaaatggccacagtcacagcgggaacgccatagccgactgggaacatgatccacttcatgagtctattgatgcttgagtagttgaccactgtcaggttccgtgcagtgaggaagaggtgcacaccctccagcagcatccaggtgaaggcggccaggtagagatagtgcaaagcaccggcgatgatggagcacagcaccttgggttcagttcgatcaatccccacgaggaagaggaggtgggccaggaagaggcagagcgagagctgcagatgcagtgaggtgctggtgttctggatggctttacacaggagaaaagtgagggccgccaggaggaggcmcagcagagagmcgctcagccccacgtaggtgatgmcagtcagcacgggatcctcctcctggctggtcagggccatcargcagcgaagctggacaggtgactgcaattacacatggtgtgactcttgtncacgtgtawcrggaagcagccatccctggaccactggctgccctgccctgtgctcttccagtagacacagaagacctttttggtactgggggtcatcttcacgtgctggaaagtcagcgtcacagacttggagagagacacgttccttttgggtccaatagcagcactcacaacctgagagttcagatacacttgatctttcttatccatctcttcaaaaaaagttgcatttatgatgtttccaagagaagaatatgagataaaggcaatgrcactgggaccttgtgtgtctccctggatgatgtcactgcaacggatgtccattgagttcatttggacgttcaagttgaatgtctttctttcttcagagcaattgtctgtaatcgcttgagtttcaatagctacactatcgttttggattttcaggactttttgttctggatctttcaaggcagtttctagaactttcgattccacatcccggagaatagtggtagctgtggatgagatttcttgtctcccttctgttctccataaagtctgattggtgagaagtgactcaaatttgtccacaatcttttgcagctctttcctgccctgggttgtctttgaggaggtggtgtcctgacaggtgttctcattggaattactgaattgttcattcccagaatgcagtctatatcctgggacacattgacagtagaaacttccttcgacattgtaacacacagcgttaaatccacaatatacactatagggtggtgtacattcattaatgtcgttacatgtctccaaggggaatgtgaatagtttctgcccagatccagaagtatatccatggttgcaggtgcagtgagtgttattgacacaggaagcatttggggggcacttagcacaggaagttttggttttctgagtcacagctccaaagaggctcagcagaaagcagaggcctggaagaagcaatggtccctgcatttctgtggtacgggtatcccacgccagccagccctggaagctctctactgtgccgtaaggcc

SEQ ID NO: 425 - DNA, 744 bp, Homo sapiens
tttttttttttttgcgtgaacagagttcttattgatagtcccatcacctccaaagcagtggcccccaccctccctcctaccagcccctccccagcacccagcccctcagtgcagcgccacctcgcaggggtggaggtgggcagcacgggcagcctcgtaggcacggcggaactcctggaatcgtggggcacagcccagccgggcctccccaaagcggctccagcccatgaagaggaaggtgcctgggcccgggtggacgccacagcgcagtggggtacgaatggaggtcagcccctggtccccggatcgccccgcctggaacagcggcggtgtctggcggaggacacgggcggccaccacagtgatgacagactcctgcagctccacgtcatgggtgaccccatggatgatcccgtgaattactgtggggaggcatgtggctgcggtaggcattcaggggaaggcaggctccaggctccccccatggcggggacactcaccgaagtcgctggtgcatgcggccaggagcagctcagcgtcgctgcagggcctgcaggcacctctacgccgagaccgtgggcctgcgggggcagctcggggcgcccgtcctygcgcagctcaaagcggaaggcggccacgcggcggctgatgtcctggtgcggcgtggcctgcaggaagagggcccggcgctcgcggggaccccagcgcacgcagcggctccctgccgggcccgggcctcgtgcc

SEQ ID NO: 426 - DNA, 1579 bp, Homo sapiens
  SITE (1485): n equals a,t,g, or c
  SITE (1541): n equals a,t,g, or c
  SITE (1550): n equals a,t,g, or c
  SITE (1559): n equals a,t,g, or c
cttctgttcaataaccgcttggtgcacttggacgagcatgccttccacggcctgcgcgcgctcagccatctctacctgggctgcaacgaactcgcctcgttctccttcgaccacctgcacggtctgagcgccacccacctgcttactctggacctctcctccaaccggctgggacacatctccgtacctgagctggccgcgctgccggccttcctcaagaacggcctctacttgcacaacaaccctttgccttgcgactgccgcctctaccacctgctacagcgctggcaccagsggggcctgagcgccgtgcgcgactttgcgcgcgagtacgtatgcttggccttcaaggtacccgcgtcccgcgtgcgcttcttccagcacagccgcgtctttgagaactgctcgtcggccccagctcttggcctagagcggccggaagagcacctgtacgcgctggtgggtcggtccctgaggctttactgcaacaccagcgtcccggccatgcgcattgcctgggtttcgccgcarcaggagcttctcagggcgccaggatcccgcgatggcagcatcgcggtgctggccgacggcagcttggccataggcaacgtacaggarcagcatgcgggactcttcgtgtgcctggccactgggccccgcctgcaccacaaccagacgcacgagtacaacgtgagcgtgcactttccgsgcccaragcccgaggctttcaacacaggcttcaccacactgctgggctgtgccgtgggccttgtgctcgtgctgctctacctgttcgccccaccctgccgctgctgccgccgtgcctgccgctgccgccgctggccccaaacacccagcccgctccaasagctgagcgcacagtcctcagtactcagcaccacaccgccagacgcacccagccgcaaggccagcgtccacaagcacgtagtctttctggagccaggccggaggggcctcaatggccgcgtgcagctggcagtagctgaggaattcgatctctacaaccctggaggcctgcagctgaaggctggctctgagtccgcagctycataggctccgagggtcccatgacaacctagactgcccagggctcccccacccaggcccccaccctcttgctgctcgccctgctccctgcttcggtccagagaactggcagatactggtgggaagcactgtgcctggccccccagcttcctgtatgggcctcgaaacacaatgggccttctcgctcactggtagagacaggggttgtggtccccaacctgccttctgctctgcccctgcacaggacccaaaggccccaggccctgcaaggtgtgctagttcctgctttcccgcggacttcctagtgcccaaatgccctgtgaggctgagagacccaggcccctgtggctttcaacacagcacagctgtggaagtggctgtgttcttctacagcctgtggaagaacccctgtagcanagcctcccgtccaccctcaggggctgaggcagctctcgaggagtggtgctcaaganctgacgcanggccacctnccctttccaagggggtggga

SEQ ID NO: 427 - DNA, 766 bp, Homo sapiens
  SITE (690): n equals a,t,g, or c
  SITE (703): n equals a,t,g, or c
  SITE (706): n equals a,t,g, or c
  SITE (733): n equals a,t,g, or c
  SITE (735): n equals a,t,g, or c
  SITE (739): n equals a,t,g, or c
tttcgaaattaaccctcactaaagggaacaaaagctggagctccaccgcggtggcggccgctctagaactagtggatcccccgggctkyaggaattcggcacgagggtaactgggggtgttatactgagcagcagcgttgtgatgggtattggcattgcccaaatggaagggatgaaaccaattgtaccatgtgccagaaggaagaatttccatgttcccgaaatggtgtctgttatcctcgttctgatcgctgcaactaccagaatcattgcccaaatggctcagatgaaaaaaactgctttttttgccaaccaggaaatttccattgtaaaaacaatcgttgtgtgtttgaaagttgggtgtgtgattctcaagatgactgtggtgatggcagcgatgaagaaaattgcccagtaatcgtgcctacaagagtcatcactgctgccgtcatagggagcctcatctgtggcctgttactcgtcatagcattgggatgtacttgtaagctttattctctgagaatgtttgaaagaagatcatttgaaacacagttgtcaagartggaagcagaattggtaagaagagaacttctycctcgtatggmcaattgattgctcaaggkttaattcaccagttgaagaattttctggttggtcacctaatcargcttctggtttggaaaatctgangctaccggwccanctnaasttggaattactttatagctcttgnangcanacaagcacaatttggaaaccgattttt

SEQ ID NO: 428 - DNA, 2022 bp, Homo sapiens
  SITE (13): n equals a,t,g, or c
  SITE (27): n equals a,t,g, or c
  SITE (55): n equals a,t,g, or c
  SITE (57): n equals a,t,g, or c
  SITE (64): n equals a,t,g, or c
  SITE (132): n equals a,t,g, or c
cagatttcgctgngggcaaccaggtgnccgcttgtcaactctttcaggccagcgntnaaggcantcagctgttgccgtctcactgggaaaagaaaacccaccctggcgcccaatacgcaaaccgccttttcnccgcgcgttgcccgattcattaatgcagctggcacgacaggtttcccgactggaaagcgggcagtgagcgcaacgcaattaatgtgagttagctcactcattaggcaccccaggctttacactttatgcttccggctcgtatgttgtgtggaattgtgagcggataacaatttcacacaggaaacagctatgaccatgattacgccaagctctaatacgactcactatagggaaagctggtacgcctgcaggtaccggtccggaattcccgggtcgacccacgcgtccgctttgatggctctaccagtgtggcccaatgcaagaatcgtcagtgtggtggggagctgggtgagttcactggctatattgagtcccccaactacccgggcaactacccagctggtgtggagtgcatctggaacatcaaccccccacccaagcgcaagatccttatcgtggtaccagagatcttcctgccatctgaggatgagtgtggggacgtcctcgtcatgagaaagaactcatccccatcctccattaccacttatgagacctgccagacctacgagcgtcccattgccttcactgcccgttccaggaagctctggatcaacttcaagacaagcgaggccaacagcgcccgtggcttccagattccctatgttacctatgatgaggactatgagcagctggtagaagacattgtgcgagatggccggctctatgcctctgaaaaccaccaggagwttttaaaggacaagaagctcatcaaggccttctttgaggtgctagcccacccccagaactacttcaagtacacagagaaacacaaggagatgctgccaaaatccttcatcaagctgctccgctccaaagtttccagcttcctgaggccctacaaatagtaaccctaggcttagagacccaattttttaagcccccagactccttagccctcagagccggcagccccctaccctcagacaaggaactctctcctctctttttggagggaaaaaaaaaatatcactacacaaaccaggcactctccctttctgtctttctagtttcctttccttgtctctctctgcctgcctctctactgttcccccttttctaacacactacctagaaaagccattcagtactggctctagtccccgtgagatgtaaagaaacagtacagccccttccactgcccattttaccagctcacattcccgaccccatcagcttggaagggtgctagaggcccatcaaggaagtgggtctggtgggaaacggggaggggaaagaagggcttctgccattatagggttgtgccttgctagtcaggggccaaaatgtcccctggctctgctccctagggtgattctaacagcccagggtcctgccaaagaagcctttgatttacaggcttaatgccagcaccagtcctctggggcacatggtttgagctctggacttcccacatggccagctttcttgtctatacagatcctctctttctttccctacgtctgcctggggtctactccataagggtttacaaatggcccacaacactgagttagtggacaccggctaaatgaggaagagcagcaggcattgtcatggtgaatgccccgctgtagctccctgagagaaagactgtaactctgcaggacagaaacaaggttttaaagcattgccaaaaaaaaaaaaaamaraaaraaaaaagtcgtatcatctaaaggactagacacagaacaattggaagtcaacttcaaacactaatcccttttcttgtcttccctgcccagccacctcctcagccccatgtgatcgccctgggggagccctactccccttgctacatgttgtccttaaacatggttattgacctgaaaa

SEQ ID NO: 429 - DNA, 981 bp, Homo sapiens
  SITE (876): n equals a,t,g, or c
  SITE (903): n equals a,t,g, or c
  SITE (916): n equals a,t,g, or c
  SITE (931): n equals a,t,g, or c
  SITE (935): n equals a,t,g, or c
gccgacatccactttctggagcctctggagtccggccgccccacaaggctgagctgcagccttccaggatcctgtgaagcgggaccacctctcacattctcctggacggggaatgccctcagccccctggaccccgagaccacccgctcctcggagctcaccctcacccccaggcccgaggaccatggcaccaacctcacctgtmaggtgaaacgccaaggagctcaggtgaccacggagagaactgtccagctcaatgtctcctatgctccacagaacctcgccatcagcatcttcttcagaaatggcacaggcacagccctgcggatcctgagcaatggcatgtcggtgcccatccaggagggccagtccctgttcctcgcctgcacagttgacagcaacccccctgcctcactgagctggttccgggagggaaaagccctcaatccttcccagacctcaatgtctgggaccctggagctgctaacataggagctagagagggaggggaattcacctgccgggttcagcatccgctgggctyccagcacctgtccttyatyctttctgtgcararaagctcctcttcctgcatatgkgtaactgaraaacarcagggctcctggcccctcgtcctcaccctgatcaggggggctctcatgggggctggcttcctcctcacctatggcctcacctggatctactataccaggtgtggaggcccccagcagagcagggctgagaggcctggctgagccccttccgctcaagacagaactgaggtgtggacacttagccctgtgggacacatgcaggacatcactgtcagcttctttctggaagctcacattccactgactacccctcttttccttnctggcccatacccccttctacttattnccctctgctttgngagtcttggccccancatnttccaagcccttgtgaaagggaatggacctttcgggcttatacccc

SEQ ID NO: 430 - DNA, 3029 bp, Homo sapiens
ggcacgagagaggaccatgtcatacatacaaagtacaaagacttaatgagtcaacatcctataaattctgtattcaagcttgtaatgaagctggggaaggtcccctctcccaagaatatattttcactactccaaaatctgtcccagctgccttgaaagcccccaaaatagagaaagtaaatgatcacatttgtgaaattacatgggagtgtttacagccaatgaaaggtgatccagttatttacagtcttcaagttatgttgggaaaagattcagaattcaaacagatttacaagggtcccgactcttccttccggtattccagccttcagctgaactgtgaatatcgcttccgtgtatgtgccattcgccagtgccaagactctctgggacaccaggacctcgtaggtccctacagcaccacagtgctcttcatctctcagaggactgaaccaccagccagcaccaacagagacactgtggaaagcacaaggacccgacgggcactgagtgacgagcagtgtgctgccgtcatccttgtgctgtttgctttcttttccattttgattgcctttatcattcagtactttgtaatcaagtgaaaatataactttattttttaactctattacattttattttgtcatgtactaaaattatttctgtattgcttttataaaaaacagtggcatttagcactggcattgagactatagcacatcatttttgccattttcagtgcttatattgttaggtagaggctggcactttattagaatgcaagccacaaaaatatcaattttgttttttttgttagggtgggtcttctttttttctttccctctctctttttttaacaaatgccttcttatagaaaaactttctaagaggcaacaatttagaatggatattttgacgaatcggcatgagtgtaacagtgataacctgatctgtttgttttaaagattattaccaagtgaaaaattcagaatgaatagaatttacactaacatgctatataaaatgttaaagtctgatgctgtgaaagcaatctagtgctatatttctacctcctcatttgtcttaattatttggtaagtgggattatgatgagtaactggaggggcttagaaacaaaaactggatgaaagagtatgcatgaagaaaagcttctttgataaatgtggagttcttcattataaatatatattcatgaattcacagataagtacttaaagaacagacagtttacttggcctaaaaatattttgatgtttactcaaaaagtacctcttcaggtcttgagaacatggaaaagaattgagtgcttttaaatactttttagaaagtaatcataaaagtaaattgaatttcaaacctatttggcttctgttttgtgaacctttgaactatatgtatgtgtataagggtatacacatacatatatggcatataacaagtgtacacatatacacataacaagtgtagaagtatatattacatacatacactcactctgtctggtataggctaattttgaagaactcccataagtttctgctgcttctcccataactgctgccaccaccatcagaattcataatcaaacctaacctttttgtttggggcaccaaatctgaagacaaaattaatttgcaccagtaaacttcaagctgctttctttcttgaaaactaaacgtttaacgtataatgtctgtttggatactgttccaaattgttgattgcatgtggttaatgttgcattagagcactttgcaattgcataattcattaatgttttgtgagcttgcatttgtgagttattggatgatcagactgaattttgtcaagtatcacattgtacatcttgcctagatgtcgatgactgcaagtaataatacagtttataatgaaactatctacaattcttgttttagcacatctgttatccgtaaaacacctgtaactagcttttttaatttattatttgaattttaggatagcgaatcactaatttttagttgctgaggttggcattttagtgattattaagcacttctgtcagtctttgaaaaaagaacgtattttttgtgctttgaagatctctgaagaatttcttttataatagaatgggcatgtattgtaacagttttatgtcaaatgatctgtgctgtagaaaaacattaacccttgttcaaaaaagaaatggataaacttggcctttctaagtggtaagaatgacctgtcactataatatactgtatgtttacattttatttaaatttaatctcttatgtatagggtgataaccttccccagaaacaacagtgattgcgattgttttctagaaacttctttaaagtgccacatttggcagtacaaatgagtctgagtgtaatagcccagagatttatatatagttgaatgtctaaaatggtaaaatgtgccactgtgtcaagttacagtggcttatgtttttcatagtaattcaaatgaacttcctatttttgatagtaaatgtcatttaatagtatacttgccatttgagcctcactgcaaaattagtgcagaggagaaaacaatttttaatgtaatcttgattttacctcatatactgtacattccaaaaactctaaactttttaaagattatagatacactaccaaacatatcaccttaaaattgtataaggctgaatgaacttcatacaaatgaaaaaaatctcataaaaatacataaactatgtagcaaaagtatctgtaaaatccatggaaaataaaagttgtatcattctttttgagatacgtttattgtattcatatatattcattatttgctacctgtttaagaaagtgaaatgttatggtctcccctcttccaatgagcttaaaacatttttcccaacagtatataaatcttcaacatgagaggatgtatatttattatataaagcccagtaaagaataaaattagaagttttatcctagtaaaaaaaaaaaaaaaaaaaaaaaaaaaaaaaaaaaaaaaaa

SEQ ID NO: 431 - protein, 59 aa, Homo sapiens
LLAELSSFSILGLISSPIYYSAFLPCSPFYGASHNTAACFIRASKQDKLQQMQVTWKSL

SEQ ID NO: 432 - protein, 101 aa, Homo sapiens
STHLGLPKCWDYSHEPPRPASLLLFIPHPSEVNASLGSKFFIVAVLLILVSKNNGVNNKDVPPRHNYSSFHLSSTYALSSFHASQLCEYYHSHFPDGTEVD

SEQ ID NO: 433 - protein, 110 aa, Homo sapiens
LSPSNRDAELATVRAGQQGMGWQGNQWETVYTFDFLFTGQGRTVALGLRDAMNRTNTLPLHLDLRLWASQYQLVSFGSHRNSGAVLPIPQEVKYRPGVVAHACYPNTLGG

SEQ ID NO: 434 - protein, 111 aa, Homo sapiens
FFILLFSKLLKVMQIKGFDLHSLGHEWQDEFSHIMAMTDPAFGSSGRPLLVLSCISQGDVKRMPCFYLAHELHLNLLNHPWLVQDTEAETLTGFLNGIEWILEEVESKRAR

SEQ ID NO: 435 - protein, 68 aa, Homo sapiens
  SITE (1): Xaa equals any of the naturally occurring L-amino acids
  SITE (48): Xaa equals any of the naturally occurring L-amino acids
  SITE (51): Xaa equals any of the naturally occurring L-amino acids
  SITE (54): Xaa equals any of the naturally occurring L-amino acids
  SITE (59): Xaa equals any of the naturally occurring L-amino acids
XSYIPIPKFLQSARLQLYSSRAPHNYVLFLPRILLTHSLLQPRHVWLXPGXAIXNNVTXYSVSCIFQI

SEQ ID NO: 436 - protein, 107 aa, Homo sapiens
  SITE (69): Xaa equals any of the naturally occurring L-amino acids
ATHGSQPLGPPGSPGLSMPSVLLCSPCLPLSKMGSLPTLQGSPPVQPVSPSTRGCALVCLGQGEPWVLXVPGTALLCNWPIHRLHPSLGPSVPGPFLGSPSLSLWLR

SEQ ID NO: 437 - protein, 116 aa, Homo sapiens
  SITE (75): Xaa equals any of the naturally occurring L-amino acids
  SITE (79): Xaa equals any of the naturally occurring L-amino acids
  SITE (96): Xaa equals any of the naturally occurring L-amino acids
  SITE (105): Xaa equals any of the naturally occurring L-amino acids
FFFLETGSHSVAQAGGQGHNHSSLEPQIPGLKQSSCLSLQRSWDYTCMRHHTWLIFVFFEETKPPYVAQAGLKLXGSRXLPTLVSQNVGITDISHXAWPWKFLIXISGGNMEIGSF

SEQ ID NO: 438 - protein, 86 aa, Homo sapiens
FFFFFLNYTLSFRVHVHNVQVSYICIHVPCWCAAPSNSSFNIRYISKCYPSPLPELFSREIHVITDNQQALASELKHIGNFCSKKF

SEQ ID NO: 439 - protein, 44 aa, Homo sapiens
SCRFSAVSGLSIWSKVAASSPAMSQFVPMNNTRPVISMTALLYF

SEQ ID NO: 440 - protein, 86 aa, Homo sapiens
GTRKKVSEGKRYTKGYTYTASSMMFHLTYTISIFRKQYETNFTLNVANVCNSPVFSLHVRIRRIDFRLTDGCSNKKMNCLGEFELF

SEQ ID NO: 441 - protein, 251 aa, Homo sapiens
ALRGYSSLSPREKVRGETFGGEKGYDKSGQRIVLGHLASPFFCSCRWRCTPVFQKRLVQAPVLHLAVINLISRREEGEVTDLEEGMITLGEEAGLRNTFCDCVPIAQPCDVDRRRKDVVHKTDEGVGLTQCHGRLGKHCDLRNLIGSSGRVVAFNHDVQVVFCHSHVSQCTLRVKTSKFAELRPPPGSLLLLQVHVELLISIKFMGELARGTVKLVQVYTTRGNMVSHNVFTSTGAHHGGQSEGPQQQSFV

SEQ ID NO: 442 - protein, 163 aa, Homo sapiens
  SITE (155): Xaa equals any of the naturally occurring L-amino acids
  SITE (157): Xaa equals any of the naturally occurring L-amino acids
  SITE (162): Xaa equals any of the naturally occurring L-amino acids
RPTRPDRHCGHHSLFYHSGYRAGRTTGQWTAGHVSGHPEGHPPGKVFRIFKLSRHSKGLQILGQTLKASMRELGLLIFFLFIGVILFSSAVYFAEVDEPESHFSSIPDGFWWAVVTMTTVRLWGHVPDHPRGVRIVGTLCAIGRGPHHCPPCGLXLXSNFQXI

SEQ ID NO: 443 - protein, 82 aa, Homo sapiens
  SITE (5): Xaa equals any of the naturally occurring L-amino acids
GSCPXPPTERKNMNGAEPAPRALFPLSGGSTHHMLRLQVPLQLLAEVFGAEFHGGSPAGTAAQQGHNPSSGAGHATLLPYRS

SEQ ID NO: 444 - protein, 59 aa, Homo sapiens
LLWSQLFVTPVKHERLQCFLFPYWKLAFSFLFLPFFLSLFLSLSLSLSLSLSLTHSQIC

SEQ ID NO: 445 - protein, 75 aa, Homo sapiens
HYKHHAWLILFLVEMGFRHVGQAGLELLSLKRFAWLGLPQCWDYRRDHHARPIFSYKEHQSYWIKGLPCSSMTSS

SEQ ID NO: 446 - protein, 272 aa, Homo sapiens
GYSESWLSPSSRCEDHSDFIPGARSILPILQLSCIIQGTLLLTHFNYSASRLENLVKKTKREKRLTLSHPGCPPQPPNWRHAGWGNGRGHRRLSSRGDGRRWVAGWRQAQPWRRMRGDCVGRREAWGWGWEVGVVGGWGWGVARSRGWDGRWGEGGWGRRHRWRGRVGRIDMGVVGQVCRWAVGGGQGTVGGSLGLHHGLQALVALSRHVGAGGGHPGHVAGGGWGRGPVWQRRWLVHRGRVGRRGNLDFGEVSGIHRARRLSLTPRVRGRV

SEQ ID NO: 447 - protein, 83 aa, Homo sapiens
KTFSPVPGFLRCIYFIESAFLKLVFKNIQNKIQTPNYFKTRNTLSVEMPTVLSKHRVNSLGEMINVKVNSHWYICKKVIWYIS

SEQ ID NO: 448 - protein, 74 aa, Homo sapiens
CAMEICFPSLLFFFLLCLSCSLIHKVIFFLNIIKNIIFFPLLTVHTFYITTCYGLNCIPSKLMCWNPHPQYFKV

SEQ ID NO: 449 - protein, 521 aa, Homo sapiens
TGRRCRFWADGSGSRTVPSPSPSSPLPSPGSPTHRSLGPTTPPMASATEDPVLERYFKGHKAAITSLDLSPNGKQLATASWDTFLMLWNFKPHARAYRYVGHKDVVTSVQFSPHGNLLASASRDRTVRLWIPDKRGKFSEFKAHTAPVRSVDFSADGQFLATASEDKSIKVWSMYRQRFLYSLYRHTHWVRCAKFSPDGRLIVSCSEDKTIKIWDTTNKQCVNNFSDSVGFANFVDFNPSGTCIASAGSDQTVKVWDVRVNKLLQHYQVHSGGVNCISFHPSGNYLITASSDGTLKILDLLEGRLIYTLQGHTGPVFTVSFSKGGELFASGGADTQVLLWRTNFDELHCKGLTKRNLKRLHFDSPPHLLDIYPRTPHPHEEKVETVEINPKLEVIDLQISTPPVMDILSFDSTTTTETSGRTLPDKGEEACGYFLNPSLMSPECLPTTTKKKTEDMSDLPCESQRSIPLAVTDALEHIMEQLNVLTQTVSILEQRLTLTEDKLKDCLENQQKLFSAVQQKS

SEQ ID NO: 450 - protein, 57 aa, Homo sapiens
TGIFYKSIIARLSYASCLCNCCCLCLISFPPTLSHKLIHVLQNYYFFRIISNMVLDA

SEQ ID NO: 451 - protein, 133 aa, Homo sapiens
  SITE (38): Xaa equals any of the naturally occurring L-amino acids
  SITE (92): Xaa equals any of the naturally occurring L-amino acids
RWRKRNLRTIVQLWILNQTREHLLCQQQPAVPPPPPSXLPLSNAAATDLCLQWFRPTCCTGNSTGIASAPQLSCSVPSANVCSPTTALDAAXCSSSAAAFKQLPAWEPCCCSGKFVQWKTIYISHREVSHSSQ

SEQ ID NO: 452 - protein, 171 aa, Homo sapiens
KSRGPRKGSGSSARSSTTTWEYMKTTWFHKDKRLESGDRIRTGTTLDEIWLHILDPKDSDKGKYTLEIAAGKEVRQLSTDLSGQAFEDAMAEHQRLKTLAIIEKNRAKVVRGLPDVATIMEDKTLCLTCIVSGDPTPEISWLKNDQPVTFLDRYRMEVRGTEVTITIEKVN

SEQ ID NO: 453 - protein, 122 aa, Homo sapiens
  SITE (72): Xaa equals any of the naturally occurring L-amino acids
FLKAPDERRQEMANILAQKQLRSIILTHVIRAQRAINNEMAHQLYVLQVLTFNLLEDRMMTKMDPQDQAQRXIIFELRRIAFDAESEPNNSSGSMEKRKSMYTRDYKKLGVHCNLGFYSCNN

SEQ ID NO: 454 - protein, 111 aa, Homo sapiens
SHSVAQAGVRWCDSAHCNLCLPGSSDSPTSASTAAGIISVCQHAPLIFVFLVEMGFHHVGQASVELLTSSDPPTSATQRAGITGMSHHAQPIYTFVIQKISVSIKNPFSIA

SEQ ID NO: 455 - protein, 68 aa, Homo sapiens
  SITE (18): Xaa equals any of the naturally occurring L-amino acids
YISKRKEGHQYLMYSPLXICRGLVTNPSIPESMHTQVLWNPHIGKLSPDYTWVPHPSNTVFNPHLVGG

SEQ ID NO: 456 - protein, 58 aa, Homo sapiens
  SITE (2): Xaa equals any of the naturally occurring L-amino acids
KXATAFLNLEPDRCYQVWVMAVNFTGCSLPSERAIFRTGKEMDAKGALEDNAQFFTDS

SEQ ID NO: 457 - protein, 90 aa, Homo sapiens
GWTITILISKNYFWVLVLYKDLQGVDMNKMCHKLKQTFLVIKDSHLGNLFATFFFFFFFAQFIVETCLCFCYVISRGNNLFMIIWDRKQI

SEQ ID NO: 458 - protein, 85 aa, Homo sapiens
HASAHASAHASAHASAANKPLVSHFRYFSSFLQREGWLSYLPKPLPGLNSTSTIYCSVLSLFHVTIAWSIREKPRLLVDSQLKYH

SEQ ID NO: 459 - protein, 43 aa, Homo sapiens
GTRSMMHTLTHLNVYSGGASMMHTLTHLNVYSGGASMMHTLTH

SEQ ID NO: 460 - protein, 190 aa, Homo sapiens
  SITE (187): Xaa equals any of the naturally occurring L-amino acids
QEGWSLPGGAARGPATAQRGGGHPRAAAVAALPPWRSHSRTRQPLSSPPWVPDFPMEAAASSHACPPQQVGWDVSLSCRSPGWESRGRTSGLRPPHTHQGRFLAPCQSLAACLEAQSPQELKVTQWWQCVTEEGAKVGFENLGQGRADLGHRLRDPDRAGSDYNVVSTFMHPSCSSHWTLAFQGHDXLPD

SEQ ID NO: 461 - protein, 139 aa, Homo sapiens
SKDRSQHATYFIGSYLELKVAGSLRQNEKPHEDEQIPLRSRKQRESPQPVKPPSAILNMNRGFSVFSSRRPLDRGSSRGPGRSSRSPFTSSARTDRSKLTPQDTLLPGPKTTICTVLYWPFKQLPAQDPSIRFPRLHLP

SEQ ID NO: 462 - protein, 164 aa, Homo sapiens
  SITE (52): Xaa equals any of the naturally occurring L-amino acids
  SITE (91): Xaa equals any of the naturally occurring L-amino acids
ARAETSSTHSESPVVVDLPDTPFIFKHTVNNSTAVISWTYALGKQPVSFYQXLLQEVAKTQENELPEAKNRPWIFNKILGTTVKLMELKPXTCYCLSVRAANTAGVGKWCKPYKFATLATDFSSFPENYPIQITVRRKEPRQKIVSSGPEEMPEAGGSGIPISW

SEQ ID NO: 463 - protein, 82 aa, Homo sapiens
DLLGILMHAYAHSWLSSVCHSPQSSSDLLSALCPGASIPFWSLRGTSRKAKDRKRQRLGYRLLPSHCIPLLGSGFGCFLCQP

SEQ ID NO: 464 - protein, 248 aa, Homo sapiens
ISAMANEAYPCPCDIGHRLEYGGLGREVQVEHIKAYVTKSPVDAGKAVIVIQDIFGWQLPNTRYIADMISGNGYTTIVPDFFVGQEPWDPSGDWSIFPEWLKTRNAQKIDREISAILKYLKQQCHAQKIGIVGFCWGGTAVHHLMMKYSEFRAGVSVYGIVKDSEDIYNLKNPTLFIFAENDVVIPLKDVSLLTQKLKEHCKAEYQIKTFSGQTHGFVHRKREDCSPADKPYIDEARRNLIEWLNKYM

SEQ ID NO: 465 - protein, 55 aa, Homo sapiens
  SITE (50): Xaa equals any of the naturally occurring L-amino acids
PKGWAWWLTLVIPHFGRLRQEDCLTHEFKSNLGNRVRPCLYKKFLKNYPXLMACT

SEQ ID NO: 466 - protein, 89 aa, Homo sapiens
ETGSLAVSLRLECSGVFIAHCSLKLLSSSHPLASASRVARTTSMHHYAWLGFFFFCFFFLEKWRCLTMLPGLVLKQSSCLGLRFTGIKL

SEQ ID NO: 467 - protein, 66 aa, Homo sapiens
SQAVRRLFAFSLSYAPSLNFCHSLGFLHCKGSYLFFASAITHTWPDVFVLSISETSEVSESGSQGL

SEQ ID NO: 468 - protein, 100 aa, Homo sapiens
EKHKVNVPVLISASQPHCCCSMSPVSLCRLLCALKSLHGTSQETSILQDDRKVSGTQPPHSLPSCLPRTAEPLPVEPGKVAQRGVAGGKEHQGSKARRSM

SEQ ID NO: 469 - protein, 178 aa, Homo sapiens
VRRKSRLRDPGLQQTLRGQLRLLENDSREMARVLGELSARLLSIHSDQDRIVVTFKTFEEIWKFSTYHALGFTHHCLANLLMDQAFWLLLPSEEEETAIQVHVDENALRLTHESLLIQEGPFFVLCPDHHVRVMTGPRDAGNGPQALRQASGAPQGEAAPGNRLFTAEPQRVLRGGGS

SEQ ID NO: 470 - protein, 107 aa, Homo sapiens
MDGAQGRLLPVSSRHSNLALLKPTSRDLTAPPEGASLMTVGGITAPRDVQVWNPRTWESVTLRGKRDPAPVLQFRISWWGDDRGWLRWALSNHGGPYKGRGVTRVCA

SEQ ID NO: 471 - protein, 185 aa, Homo sapiens
  SITE (29): Xaa equals any of the naturally occurring L-amino acids
  SITE (151): Xaa equals any of the naturally occurring L-amino acids
  SITE (185): Xaa equals any of the naturally occurring L-amino acids
CQRTQSHTLSGPGIRGASPIWTGLSKPLXLQSREVPRHLCCRNPEWLFRIYQDTKVDIPSLIQTIRRVVKGRPGPRKQKWTVGLYPGKVREARCQASVHGASEARLTVSWQIPWNLKYLKVREVKYEVWLQEQGENTYVPYILALQNHTFXENIKPFTTYLVWVRCIFNKILLGPFCRCCLVLQX

SEQ ID NO: 472 - protein, 137 aa, Homo sapiens
TRPGKWRAPFWKHKLVEKYQCHLQVLMIFVTHTDPNSGPRFGVLAQKAQMCTCPQRNPGVDRSGPGLGFRALPSPRLGAPWRCGFQSLPKGLLSLLLPCGSWRPHPAQRFSLWAQMRKESGRESRKKLGCGSDYLSL

SEQ ID NO: 473 - protein, 140 aa, Homo sapiens
  SITE (105): Xaa equals any of the naturally occurring L-amino acids
  SITE (110): Xaa equals any of the naturally occurring L-amino acids
GTSGDRCQYYVCHHYCVNSESCTIGDDGSVECVCPTRYEGPKCEVDKCVRCHGGHCIINKDSEDIFCNCTNGKIASSCQLCDGYCYNGGTCQLDPETNVPVCLCXTNWSXTQCERPAPKSSKLIISAQEALPSLCLSSSW

SEQ ID NO: 474 - protein, 279 aa, Homo sapiens
  SITE (80): Xaa equals any of the naturally occurring L-amino acids
  SITE (269): Xaa equals any of the naturally occurring L-amino acids
FCVRSVSEAGVGESSAATEPIRVKQALATPSAPYGFALLNCGKNEMVIGWKPPKRRGGGKILGYFLDQHDSEELDWHAVXQQPIPTRVCKVSDLHEGHFYEFRARAANWAGVGELSAPSSLFECKEWTMPQPGPPYDVRASEVRATSLVLQWEPPLYMGAGPVTGYHVSFQEEGSEQWKPVTSGPISGTHLRVSDLQPGKSYVFQVQAMNSAGLGQPSMPTDPVLLEDKPGAHEIEVGVDEEGFIYLAFEAPEAPSPQSSVGPKEYKGXNGTPEGQDRR

SEQ ID NO: 475 - protein, 75 aa, Homo sapiens
FFFFFFFLKWSLALSPRLESSGTISTHCNLHLPGSSYSPASASRVAGTTRDLPPRPANFCNFSRDGLSPYWPGWS

SEQ ID NO: 476 - protein, 145 aa, Homo sapiens
NSRVDPRVRPLPRRRLSVPRSASFGHTVTSGGGSRRPGMAAWSPAAAAPLLRGIRGLPLHHRMFATQTEGELRVTQILKEKFPRATAIKVTDISGGCGAMYEIKIESEEFKEKRTVQQHQMVNQALKEEIKEMHGLRIFTSVPKR

SEQ ID NO: 477 - protein, 61 aa, Homo sapiens
CRMNALPQAVSKSQHMTRLDSFPIYLGNTEVSSIKFTRRVCFGFELSSLILSELPSPVSKY

SEQ ID NO: 478 - protein, 178 aa, Homo sapiens
  SITE (37): Xaa equals any of the naturally occurring L-amino acids
  SITE (39): Xaa equals any of the naturally occurring L-amino acids
  SITE (151): Xaa equals any of the naturally occurring L-amino acids
  SITE (168): Xaa equals any of the naturally occurring L-amino acids
  SITE (172): Xaa equals any of the naturally occurring L-amino acids
  SITE (175): Xaa equals any of the naturally occurring L-amino acids
EKQHGKPRAEEGEGPILSALIYCTSEGRALTRHAASXRXGMNIEVGNISYTGAIISWSSSEPCLEDYYHIMYRPNWNSIFSGYLRYSFHHEEKVPRTISSVVLEHLAPSTLYFLCISCKKAAFPYRHYCTMFHTLDKSPLAPGSSLGRPPXLSLGADGHSAGPASQAXWASXCFXILG

SEQ ID NO: 479 - protein, 88 aa, Homo sapiens
  SITE (46): Xaa equals any of the naturally occurring L-amino acids
  SITE (59): Xaa equals any of the naturally occurring L-amino acids
LLLFLFILFHVLINIICFLLVRIPFYIQCLCFLLLAEKLHQEACSXHELGTAPLHMCFXTFHFQGPDNMRHELSHILVGDEGPYCSVS

SEQ ID NO: 480 - protein, 296 aa, Homo sapiens
  SITE (20): Xaa equals any of the naturally occurring L-amino acids
GNSTLPNRRSAQGKPRGGCXIVTADGKLTAEQGHNVTLMVQLEEGDVQRTLIQVDFGDGIAVSYVNLSSMEDGIKHVYQNVGIFRVTVQVDNSLGSDSAVLYLHVTCPLEHVHLSLPFVTTKNKEVNATAVLWPSQVGTLTYVWWYGNNTEPLITLEGSISFRFTSEGMNTITVQVSAGNAILQDTKTIAVYEEFRSLRLSFSPNLDDYNPDIPEWRRDIGRVIKKSLVEATGVPGQHILVAVLPGLPTTAELFVLPYQDPAGENKRSTDDLEHISELLIHTLNQNSVHFELKPGV

SEQ ID NO: 481 - protein, 250 aa, Homo sapiens
  SITE (212): Xaa equals any of the naturally occurring L-amino acids
  SITE (216): Xaa equals any of the naturally occurring L-amino acids
  SITE (219): Xaa equals any of the naturally occurring L-amino acids
  SITE (224): Xaa equals any of the naturally occurring L-amino acids
  SITE (228): Xaa equals any of the naturally occurring L-amino acids
  SITE (230): Xaa equals any of the naturally occurring L-amino acids
  SITE (231): Xaa equals any of the naturally occurring L-amino acids
  SITE (234): Xaa equals any of the naturally occurring L-amino acids
GSRFQASSQLRAGSWRPRPLPPVVPAVPDGSAMAQPPPDVEGDDCLPAYRHLFCPDLLRDKVAFITGGGSGIGFRIAEIFMRHGCHTVIASRSLPRVLTAARKLAGATGRRCLPLSMDVRAPPAVMAAVDQALKEFGRIDILINCAAGNFLCPAGALSFNAFKTVMDIDTSGTFNVSRVLYEKFFRDHGGVIVNITAPWGTGGRRFRCMQAXPRPXWTXDPDLXVEWXPXXSGXQLALAHSGTKGSIFGP

SEQ ID NO: 482 - protein, 116 aa, Homo sapiens
  SITE (7): Xaa equals any of the naturally occurring L-amino acids
  SITE (93): Xaa equals any of the naturally occurring L-amino acids
  SITE (104): Xaa equals any of the naturally occurring L-amino acids
RLRNSAXIMWNSSDANFSCYHESVLGYRYVAVSWGVVVAVTGTVGNVLTLLALAIQPKLRTRFNLLIANLTLADLLYCTLLQPFSVDTYLHLXWRTVPPSAGYXGSSFLPPILSPS

SEQ ID NO: 483 - protein, 65 aa, Homo sapiens
DNPSYFLIPPIQWLKIAKTFIVERLLFLQAYVSLPLSLCTYSQGQMLSSIISHFLLLTVLADAWV

SEQ ID NO: 484 - protein, 72 aa, Homo sapiens
VAFPVNPWFQALSLNNHSYCEFSTRKSQGWAITIKIIWFLKVLPLWESRTIQWVVSSEDYVHNLWWAGKASV

SEQ ID NO: 485 - protein, 363 aa, Homo sapiens
ARAARARAEFGTSGDAVTLKCNFKTDGRMREIVWYRVTDGGTIKQKIFTFDAMFSTNYSHMENYRKREDLVYQSTVRLPEVRISDNGPYECHVGIYDRATREKVVLASGNIFLNVMAPPTSIEVVAADTPAPFSRYQAQNFTLVCIVSGGKPAPMPTTENIPETVVSREFPRWVHSAEPTYFLRHSRTPSSDGTVEVRALLTWTLNPQIDNEALFSCEVKHPALSMPMQAEVTLVAPKGPKIVMTPSRARVGDTVRILVHGFQNEVFPEPMFTWTRVGSRLLDGSAEFDGKELVLERVPAELNGSMYRCTAQNPLGSTDTHTRLIVFENPNIPRGTEDSNGSIGPTGARLTLVLALTVILELT

SEQ ID NO: 486 - protein, 255 aa, Homo sapiens
  SITE (233): Xaa equals any of the naturally occurring L-amino acids
  SITE (238): Xaa equals any of the naturally occurring L-amino acids
QLALVLCTVDSRPPAQLALSHAGRLLASSTAASVPNTLRLELRGPQPRDEGFYSCSARSPLGQANTSLELRLEGVRVILAPEAAVPEGAPITVTCADPAAHAPTLYTWYHNGRWLQEGPAASLSFLVATRAHAGAYSCQAQDAQGTRSSRPAALQVLYAPQDAVLSSFRDSRARSMAVIQCTVDSEPPAELALSHDGKVLATSSGVHSLASGTGHVQVARNALRLQVQDVPAXDDTYXCTAQNCWAQSAPSGGCR

SEQ ID NO: 487 - protein, 195 aa, Homo sapiens
LSTGPQLLLSSGRISGLSRASACTRSSTNSSADDILVYRMIPAESRSFLLTDLASGRTYDLCVLAVYEDSATGLTATRPVGCARFSTEPALRPCGAPHAPFLGGTMIIALGGVIVASVLVFIFVLLMRYKVHGGQPPGKAKIPAPVSSVCSQTNGALGPTPTPAPPAPEPAALRAHTVVQLDCEPWGPGHEPVGP

SEQ ID NO: 488 - protein, 58 aa, Homo sapiens
PRLSLIYACHTEAGTLPREGGGSHTADSQVWLLPKPHLPSRCSKQGHKVWLFKKKKKK

SEQ ID NO: 489 - protein, 55 aa, Homo sapiens
AHLSARLSALILDEVAILPAPQNLSVLSTNMKHLLMWSPVIAPGETVYYSVEYQG

SEQ ID NO: 490 - protein, 78 aa, Homo sapiens
QNSPGQRGSISCSIRNPAIPHGWFLSGSGDTLQPPADIQNLRPRDCCCGTVCLTPASSPLLSARRMGVTAQTFPLDRL

SEQ ID NO: 491 - protein, 137 aa, Homo sapiens
LSLFGNLVIMVSISHFKQLHSPTNFLILSMATTDFLLGFVIMPYSIMRSVESCWYFGDGFCKFHTSFDMMLRLTSIFHLCSIAIDRFYAVCYPLHYTTKMTNSTIKQLLAFCWSVPALFSFGLGVFSLPPLCFQAHG

SEQ ID NO: 492 - protein, 87 aa, Homo sapiens
SGVTFTHIGHSLGLWATDGLPPILDLQPQCGFMRRLSPPVLSPGGYLVSAPDSRGGAVAGVFYTLCSIPTSAPGPMAVAHPRDWLHT

SEQ ID NO: 493 - protein, 70 aa, Homo sapiens
  SITE (57): Xaa equals any of the naturally occurring L-amino acids
  SITE (65): Xaa equals any of the naturally occurring L-amino acids
AQVATKGAVTAMTKALALDESPYGVRVNCISPGNIWTPLWEELAALMPDPRATIREXMLAQPLGXMGPAR

SEQ ID NO: 494 - protein, 654 aa, Homo sapiens
GTSEDSGSYNFRFEISEVNRWSDVKGTLVTVTEEPRVPTIASPVELLEGTEVDFNCSTPYVCLQEQVRLQWQGQDPARSVTFNSQKFEPTGVGHLETLHMAMSWQDHGRILRCQLSVANHRAQSEIHLQVKYAPKGVKILLSPSGRNILPGELVTLTCQVNSSYPAVSSIKWLKDGVRLQTKTGVLHLPQAAWSDAGVYTCQAENGVGSLVSPPISLHIFMAEVQVSPAGPILENQTVTLVCNTPNEAPSDLRYSWYKNHVLLEDAHSHTLRLHLATRADTGFYFCEVQNVHGSERSGPVSVVVNHPPLTPVLTAFLETQAGLVGILHCSVVSEPLATLVLSHGGHILASTSGDSDHSPRFSGTSGPNSLRLEIRDLEETDSGEYKCSATNSLGNATSTLDFHANAARLLISPAAEVVEGQAVTLSCRSGLSPTPDARFSWYLNGALLHEGPGSSLLLPAASSTDAGSYHCRARDGHSASGPSSPAVLTVLYPPRQPTFTTRLDLDAAGAGAGRRGLLLCRVDSDPPARLQLLHKDRVVATSLPSGGGCSTCGGCSPRMKVTKAPNLLRVEIHNPLLEEEGLYLCEASNALGNASTSATFNGQATVLAIAPSHTLQEGTEANLTCNVSRKLLAALLTSPGSEMGCCGPRVPWKP

SEQ ID NO: 495 - protein, 167 aa, Homo sapiens
  SITE (157): Xaa equals any of the naturally occurring L-amino acids
LRVPHRLAKHSPQQPAWEAMLQGMHRLPDRRRLGRRASSAMYRGAAVNLTLVTPEKAIKLAANDFFRRLLMEDGMQRNLKMEMLAGCGAGMCQVVVTCPMEMLKIQLQDAGRLAVHHQGSASAPSTSRSYTTGSASTHRRPSATLIAWELLRTSGAXLGSYRGLGGH

SEQ ID NO: 496 - protein, 98 aa, Homo sapiens
TFPPPSGVVNRCVYSTTKAAVIGLTKSVAADFIQQGIRCNCVCPGTVDTPSLQERITSQREILKRHRNGFPWKGTKRPGKIRQLPGRKLAMALAGYFG

SEQ ID NO: 497 - protein, 276 aa, Homo sapiens
TRPVISWGALGLELAVSVGSSDFCVDPDAYVTKMVEEYSVLSGDILQYYLACSPRAANPFQQKLSGSHKALVEMQDVVAELLRTVPWEQPATKDPLLRVQEVLNGTEVNLQHLTALVDCRSLHLDYVQALTGFCYDGVEGLIYLALFSFVTALMFSSIVCSVPHTWQQKRGPDEDGEEEAAPGPRQAHDSLYRVHMPSLYSCGSSYGSETSIPAAAHTVSNAPVTEYMSQNANFQNPRCENTPLIGRESPPPSYTSSMRAKYLATSQPRPDSSGSH

SEQ ID NO: 498 - protein, 337 aa, Homo sapiens
GTSRGGRMKLIDYGLSGYQEESAEVKAMDFITSTAILPLLFGCLGVFGLFRLLQWVRGKAYLRNAVVVITGATSGLGKECAKVFYAAGAKLVLCGRNGGALEELIRELTASHATKVQTHKPYLVTFDLIDSGAIVAAAAEILQCFGYVDILVNNAGISYRGTIMDTTVDVDKRVMETNYFGPVALTKALLPSMIKRRQGHIVAISSIQGKMSIPFRSAYAASKHATQAFFDCLRAEMEQYEIEVTVISPGYIHTNLSVNAITADGSRYGVMDTTTAQGRSPVEVAQDVLAAVGKKKKDVILADLLPSLAVYLRTLAPGLFFSLMASRARKERKSKNS

SEQ ID NO: 499 - protein, 236 aa, Homo sapiens
YYFLFAPTLCYELNFPRSPRIRKRFLLRRILEMLFFTQLQVGLIQQWMVPTIQNSMKPFKDMDYSRIIERLLKLAVPNHLIWLIFFYWLFHSCLNAVAELMQFGDREFYRDWWNSESVTYFWQNWNIPVHKWCIRHFYKPMLRRGSSKWMARTGVFLASAFFHEYLVSVPLRMFRLWAFTGMMAQIPLAWFVGRFFQGNYGNAAVWLSLIIGQPIAVLMYVHDYYVLNYEAPAAEA

SEQ ID NO: 500 - protein, 105 aa, Homo sapiens
  SITE (77): Xaa equals any of the naturally occurring L-amino acids
HSQLRRHHRSAVRPTGGDPLQGPVFPDPETAAADQDGGRIINISSGLARFSLPGYSAYASMKGAVEVLTRYQAKELXARGITVNTLAPGAIATDFSGGWCATIRT

SEQ ID NO: 501 - protein, 116 aa, Homo sapiens
SAWIRCPSLLLLGRQLSLLAPASSGVTVNALHPGVARTELGRHTGIHGSTFSSTTLGESPPSLGSPRGALHPCFLSPGPRTLPQRPSLRPHACSSPTSSEAQSTGPFPPLTWPASL

SEQ ID NO: 502 - protein, 94 aa, Homo sapiens
  SITE (63): Xaa equals any of the naturally occurring L-amino acids
TGFYFCEVQNVHGSERSGPVSVVVNRKRPGWGGTGHIRAGPDGGAPRKGWGPGHGNFKATYLXVALSSCPSSAHLGNALTSLVPSYFIFGSLNL

SEQ ID NO: 503 - protein, 88 aa, Homo sapiens
HEPQPHPSPSLALITDPSPSQLGFLFVGSTKGALDMLTKVMALELGPHKIRVNAVNPTVVMTSMGQATWSDPHKAKTMLNRIPLGKFA

SEQ ID NO: 504 - protein, 144 aa, Homo sapiens
  SITE (2): Xaa equals any of the naturally occurring L-amino acids
  SITE (109): Xaa equals any of the naturally occurring L-amino acids
  SITE (127): Xaa equals any of the naturally occurring L-amino acids
KXETPSNPVATVKAGERQWCDVGIFKNNTALVSQFYLLPKGKQSISKVGNADVPDYSLLKKQDLVPGTGYRFRVAAINGCGIGPFSKISEFKTCIPGFPGAPSAVRISXNVEGIHLSWEPPTSPSGXYFGIFSLLGYPHSTDTR

SEQ ID NO: 505 - protein, 124 aa, Homo sapiens
KLEGTRPQVYSQPAPAAKAPWASYLGAQSPHGGGARHPVHACALRPANQRRVRMRRDWLFSCANPSLPQKRRGEGATSGEARLWRSCGGRLSTTSNWSSAIAVCFRCEQGRRLSIAGVQARGCP

SEQ ID NO: 506 - protein, 109 aa, Homo sapiens
  SITE (3): Xaa equals any of the naturally occurring L-amino acids
  SITE (103): Xaa equals any of the naturally occurring L-amino acids
LLXECRADLAAIYHERIDVEGHHYGPASPQRKDALKAVDTVLKYMTKWIQERGLQDRLNVIIFSDHGMTDIFWMDKVIELNKYISLNDLQQVKDRGPVIYNKXSTVEHM

SEQ ID NO: 507 - protein, 108 aa, Homo sapiens
  SITE (93): Xaa equals any of the naturally occurring L-amino acids
  SITE (106): Xaa equals any of the naturally occurring L-amino acids
KNRAGPEAEKRLRRGPEEDGPWGPWDRRGARSQGKGRRARPTSPELESSDDSYVSAGEEPLEAPVFEIPLQNVVVAPGADVLLKCIITANPPXQVSWHKDGSALRXEG

SEQ ID NO: 508 - protein, 147 aa, Homo sapiens
FEVQRVSLFPSQTAIEANTTIGIPGTFSARLQPNDTRDDVQSIAAQIYEGLSFGVGDAVIGVNPVTDDVENLSRVLDTIYGVIDKFNIPTQGCVLAHVTTQIEAIRRGAPGGLIFQSICGSEKGLKEFGVELAMLDEARAVGAEFNR

SEQ ID NO: 509 - protein, 109 aa, Homo sapiens
TKFQATHNLLNYHQIPDPGLREVLPDYLFHLQYLRFFFDHWVHYFYGSWGYTSQTWSWKTTHRPQCEPHFYHQFLIAALFLKWNKVIRSGNVYYWNNLTYQLVILFTFL

SEQ ID NO: 510 - protein, 744 aa, Homo sapiens
ELARGAFSGLDKLRRLILQGNRIRSITKKAFTGLDALEHLDLSDNAIMSLQGNAFSQMKKLQQLHLNTSSLLCDCQLKWLPQWVAENNFQSFVNASCAHPQLLKGRSIFAVSPDGFVCDDFPKPQITVQPETQSAIKGSNLSFICSAASSSDSPMTLGWKKDNELLHDAEMENYAHLRAQGGEVMEYTTILRLREVEFASEGKYQCVISNHFGSSYSVKAKLTVNMLPSFTKTPMDLTIRAGAMARLECAAVGHPAPQIAWQKDGGTDFPAARERRMHVMPEDDVFFIVDVKIEDIGVYSCTAQNSAGSISANATLTVLETPSFLRPLLDRTVTKGETAVLQCIAGGSPPPKLNWTKDDSPLVVTERHFFAAGNQLLIIVDSDVSDAGKYTCEMSNTLGTERGNVRLSVIPTPTCDSPQMTAPSLDDDGWATVGVVIIAVVCCVVGTSLVWVVIIYHTRRRNEDCSITNTDETNLPADIPSYLSSQGTLADRQDGYVSSESGSHHQFVTSSGAGFFLPQHDSSGTCHIDNSSEADVEAATDLFLCPFLGSTGPMYLKGNVYGSDPFETYHTGCSPDPRTVLMDHYEPSYIKKKECYPCSHPSEESCERSFSNISWPSHVRKLLNTSYSHNEGPGMKNLCLNKSSLDFSANPEPASVASSNSFMGTFGKALRRPHLDAYSSFGQPSDCQPRAFYLKAHSSPDLDSGSEEDGKERTDFQEENHICTFKQTLENYRTPNFQSYDLDT

SEQ ID NO: 511 - protein, 423 aa, Homo sapiens
  SITE (165): Xaa equals any of the naturally occurring L-amino acids
  SITE (168): Xaa equals any of the naturally occurring L-amino acids
  SITE (307): Xaa equals any of the naturally occurring L-amino acids
GGQVPPQSAMAALRYAGLDDTDSEDELPPGWEERTTKDGWVYYANHTEEKTQWEHPKTGKRKRVAGDLPYGWEQETDENGQVFFVDHINKRTTYLDPRLAFTVDDNPTKPTTRQRYDGSTTAMEILQGRDFTGKVVVVTGANSGIGFETAKSFALHGAHVILACXNMXRASEAVSRILEEWHKAKVETMTLDLALLRSVQHFAEAFKAKNVPLHVLVCNAATFALPWSLTKDGLETTFQVNHLGHFYLVQLLQDVLCRSAPARVIVVSSESHRFTDINDSLGKLDFSRLSPTKNDYWAMLAYNRSKXCNILFSNELHRRLSPRGVTSNAVHPGNMMYSNIHRSWWVYTLLFTLARPFTKSMQQGAATTVYCAAVPELEGLGGMYFNNCCRCMPSPEAQSEETARTLWALSERLIQERLGSQSG

SEQ ID NO: 512 - protein, 149 aa, Homo sapiens
  SITE (60): Xaa equals any of the naturally occurring L-amino acids
  SITE (88): Xaa equals any of the naturally occurring L-amino acids
ESGGSPAEAGEQPTMEPQKIMPPSKPHPPVVGKVTHHSIELYWDLEKKAKRQGPQEQWFXFSIEEEDPKMHTYGIIYTGYATKHVVEXLEPRTLYRFRLKVTSPSGECEYSPLVSVSTTREPISSEHLQRAVSVNDEDLLVRILQRRPC

SEQ ID NO: 513 - protein, 290 aa, Homo sapiens
PGSEKVALGTKGPTALNTGAGTMLGPGATPFLSPASVESSVLLCLLVPHPVLSRGPPASPPSSYHPSLGPGGVDSDPSLNMDLNLLSRTRASPLVKTQGTQEGPSGAVALQGHSWRPRGTARCPTTSWRVLPVQLPVRPSRDAGDPGFSALSHGESEGRGLSLGPMAPGRVLHQQDPFEGLQGSPRSPPLPAPQCPSSLLGPVPSPPQGLGLLGAKGPLVLSSLTIPDHGHTCPLVICKYFYWTQFSSELAGTSGCHSSVMTWGRWERPRALPRGGLPCIHDPVCDYQPT

SEQ ID NO: 514 - protein, 269 aa, Homo sapiens
TKVLFPATSKHTPTKSHRRAKKPSGTHWISATETTHAGTHALRKALRAPAHIPTALRTYPNSVRPAAAANGDSLSFQLQLPFLSVVLKRFCSVSPESSLCSPHRTKGPVYFPKTQLVPVCLCPGQCKRIPAALPVGRQQRGLQRQERLGAVPKQPVSCPLLGLQSPPWNRRYLLSGRKGPRDKLKVTTPGRDTGLGWVGRECLPLLPPAWREGNEYQSGLLPDPSKGWGTKALNKSQTTQQWWEQTGGGRRKGGTANIIKNKTKQKNTS

SEQ ID NO: 515 - protein, 171 aa, Homo sapiens
SWSFLSAFVLGWPLLWFGQRPYLGGPGYSPGCRNAGGCSRSSRGSSRGRPMALFFSRGRGDQQSCPGRRGALWRGCLRAWVMVRWVPLMDCHDSLPDLYVQLDLAEVHRLVLLPQVRDPCSCFPLEIRNEAQMSALTASLHGTGVLASALCLASASQGWRLPPQSLHPQRS

SEQ ID NO: 516 - protein, 158 aa, Homo sapiens
  SITE (122): Xaa equals any of the naturally occurring L-amino acids
WKAMESALPAAGFLYWVGAGTVAYLALRISYSLFTALRVWGVGNEAGVGPGLGEWAVVTGSTDGIGKSYAEELAKHGMKVVLISRSKDKLDQVSSEIKKFKVETRTIAVDFASEDIYDKIKXGLAGLEIGILGWAGLKPQPSSHRVGLSGVQPHPGSS

SEQ ID NO: 517 - protein, 113 aa, Homo sapiens
  SITE (46): Xaa equals any of the naturally occurring L-amino acids
  SITE (48): Xaa equals any of the naturally occurring L-amino acids
  SITE (54): Xaa equals any of the naturally occurring L-amino acids
  SITE (77): Xaa equals any of the naturally occurring L-amino acids
  SITE (113): Xaa equals any of the naturally occurring L-amino acids
SWSYCDSCSSLGLFSTAGVEDYCASKFGVVGFHESLSHELKAAEKXGXKTTLVXPYLVDTGMFRGCRIRKEIEPFLXPLKPDYCVKQAMKAILTDQPMICTPRLMYIVTFMKX

SEQ ID NO: 518 - protein, 87 aa, Homo sapiens
SCSSRAAGCWSPGQAKCPGIEPVCVDLGDWEATERALGSVGPVDLLVNNAAVALLQPFLEVTKEAFDRSFEVNLRAVIQVSQIVARG

SEQ ID NO: 519 - protein, 117 aa, Homo sapiens
  SITE (5): Xaa equals any of the naturally occurring L-amino acids
  SITE (35): Xaa equals any of the naturally occurring L-amino acids
  SITE (99): Xaa equals any of the naturally occurring L-amino acids
  SITE (108): Xaa equals any of the naturally occurring L-amino acids
RKLIXCKAEGIPTPRVLWAFPEGVVLPAPYYGNRXTVHGNGSLDIRSLRKSDSVQLVCMARNEGGEARLILQLTVLEPMEKPIFHDPISEKITAMAGHXISLNCSAAXTPTTRLVWG

SEQ ID NO: 520 - protein, 674 aa, Homo sapiens
GPEGSSPRLHVAVAPNTLRLEIHGAMLEDEGVYICEASNTLGQASASADFDAQAVNVQVWPGATVREGQLVNLTCLVWTTHPAQLTYTWYQDGQQRLDAHSIPLPNVTVRDATSYRCGVGPPGRAPRLSRPITLDVLYAPRNLRLTYLLESHGGQLALVLCTVDSRPPAQLALSHAGRLLASSTAASVPNTLRLELRGPQPRDEGFYSCSARSPLGQANTSLELRLEGVRVILAPEAAVPEGAPITVTCADPAAHAPTLYTWYHNGRWLQEGPAASLSFLVATRAHAGAYSCQAQDAQGTRSSRPAALQVLYAPQDAVLSSFRDSRARSMAVIQCTVDSEPPAELALSHDGKVLATSSGVHSLASGTGHVQVARNALRLQVQDVPAGDDTYVCTAQNLLGSISTIGRLQVEGARVVAEPGLDVPEGAALNLSCRLLGGPGPVGNSTFAWFWNDRRLHAEPVPTLAFTHVARAQAGMYHCLAELPTGAAASAPVMLRVLYPPKTPTMMVFVEPEGGLRGILDCRVDSEPLASLTLHLGSRLVASSQPQGAPAEPHIHVLASPNALRVDIEALRPSDQGEYICSASNVLGSASTSTYFGVRALHRLHQFQQLLWVLGLLVGLLLLLLGLGACYTWSSLILMQPHVRPQPVPHPWADRGVACPPEEKVARICDDSSL

SEQ ID NO: 521 - protein, 299 aa, Homo sapiens
GTRRNSIQIYLLNVAIADLLLIFCLPFRIMYHINQNKWTLGVILCKVVGTLFYMNMYISIILLGFISLDRYIKINRSIQQRKAITTKQSIYVCCIVWMLALGGFLTMIILTLKKGGHNSTMCFHYRDKHNAKGEAIFNFILVVMFWLIFLLIILSYIKIGKNLLRISKRRSKFPNSGKYATTARNSFIVLIIFTICFVPYHAFRFIYISSQLNVSSCYWKEIVHKTNEIMLVLSSFNSCLDPVMYFLMSSNIRKIMCQLLFRRFQGEPSRSESTSEFKPGYSLHDTSVAVKIQSSSKST

SEQ ID NO: 522 - protein, 251 aa, Homo sapiens
FRKGPQSYKEVEQRAVNPIQLPLENGVSEKTGHPLHSTTPSPCCQAQSLPALWQPDQSPRTSINGDRPQPSTHVFPKTLFQEMNVNECGMKPRPCQHRCVNTHGSYKCFCLSGHMLMPDATCVNSRTCAMINCQYSCEDTEEGPQCLCPSSGLRLAPNGRDCLDIDECASGKVICPYNRRCVNTFGSYYCKCHIGFELQYISGRYDCIDINECTMDSHTCSHHANCFNTQGSFKCKCKQGYKGNGLRCSGK

SEQ ID NO: 523 - protein, 223 aa, Homo sapiens
  SITE (24): Xaa equals any of the naturally occurring L-amino acids
PQDSLYQELLQTTRWFIQLFLHHXAQAPLRGTVMQAPAVRQVNPQNSVTVRVPQTTTYVVNNGLTLGSTGPQLTVHHRPPQVHTEPPRPVHPAPLPEAPQPQRLPPEAASTSLPQKPHLKLARVQSQNGIVLSWSVLEVDRSCATVDSYHLYAYHEEPSATVPSQWKKIGEVKALPLPMACTLTQFVSGSKYYFAVRAKDIYGRFGPFCDPQSTDVISSTQSS

SEQ ID NO: 524 - protein, 262 aa, Homo sapiens
  SITE (100): Xaa equals any of the naturally occurring L-amino acids
  SITE (225): Xaa equals any of the naturally occurring L-amino acids
  SITE (234): Xaa equals any of the naturally occurring L-amino acids
  SITE (254): Xaa equals any of the naturally occurring L-amino acids
SSEADGRRGPMARPGMERWRDRLALVTGASGGIGAAVARALVQQGLKVVGCARTVGNIEELAAECKSAGYPGTLIPYRCDLSNEEDILSMFSAIRSQHSXVDICINNAGLARPDTLLSGSTSGWKDMFNVNVLALSICTREAYQSMKERNVDDGHIININSMSGHRVLPLSVTHFYSATKYAVTALTEGLRQELREAQTHIRATCISPGVVETQFAFKLHDKDPXKAAATYEQXKCLKPEDVAEAVIYVLSTPXHIQIGRTS

SEQ ID NO: 525 - protein, 157 aa, Homo sapiens
  SITE (88): Xaa equals any of the naturally occurring L-amino acids
ARDTSELAAAARGPPTLGFRERRSARSLDRIRPILVLMVDKKLVVVFGGTGAQGGSVARTLLEDGTFKVRVVTRNPRKKAAKELRLQXAEVVQGDQDDQVIMELALNGAYATFIVTNYWESCSQEQEVKQGKLLADLARRLGLHYVVLQRPGRTSRS

SEQ ID NO: 526 - protein, 145 aa, Homo sapiens
  SITE (43): Xaa equals any of the naturally occurring L-amino acids
  SITE (144): Xaa equals any of the naturally occurring L-amino acids
NKCAASWQVVVITGANTGIGKETARELASRGARVYIACRDVLXGESAASEIRVDTKNSQVLVRKLDLSDTKSIRAFAEGFLAEEKQLHILINNAGVMMCPYSKTADGFETHLGVNHLGHFLLTYLLLERLKVSAPARVVNVSSXP

SEQ ID NO: 527 - protein, 234 aa, Homo sapiens
LIVNLALVDLGLALTLPFWAAESALDFHWPFGGALCKMVLTATVLNVYASIFLITALSVARYWVVAMAAGPGTHLSLFWARIATLAVWAAAALVTVPTAVFGVEGEVCGVRLCLLRFPSRYWLGAYQLQRVVLAFMVPLGVITTSYLLLLAFLQRQQRRRQDSRVVARSVRILVASFFLCWFPNHVVTLWGVLVKFDLVPWNSTFYTIQTYVFPVTTCLAHSNSCLNPIVYVLS

SEQ ID NO: 528 - protein, 167 aa, Homo sapiens
ILRMGATDQLSKEDWQQTFAVNVGGAFNLFQQTMNQFRRQRGGAIVTVASDAAHTPRIGMSAYGASKAALKSLALSVGLELAGSGVRCNVVSPGSTDTDMQRTLWVSDDAEEQRIRGFGEQFKLGIPLGKIARPQEIANTILFLASDLASHITLQDIVVDGGSTLGA

SEQ ID NO: 529 - protein, 200 aa, Homo sapiens
DETENIERNKKMKRVLFFLLMIFVSFGVIADCEIQAKDHDCFTIFAKGTIFSAFPVLNNKAMWRWYQNEDIGEYYWQTELGTCKNNKFTPSGARLLIRVGSLRLNENHAIKGTLQELINTAEKTAFLGDRFRSYIRAGIYQKKSSDPVQLLAVLDNSIMVKYFKDEKPTYARMTAHLPNKNESYECLIKIQHELIRSEEK

SEQ ID NO: 530 - protein, 196 aa, Homo sapiens
PEVKWYKEYMCIEPDNIKYVISEEKGSHTLKIRNVCLSDSATYRCRAVNCVGEAICRGFLTMGDSEIFAVIAKKSKVTLSSLMEELVLKSNYTDSFFEFQVVEGPPRFIKGISDCYAPIGTAAYFQCLVRGSPRPTVYWYKDGKLVQGRRFTVEESGTGFHNLFITSLVKSDEGEYRCVATNKSGMAESFAALTLT

SEQ ID NO: 531 - protein, 374 aa, Homo sapiens
TRPDSDVPDDNSDDLEVPVPAEDLCNEGQIASDEEELVEAAAAVSQHDSSDDAGEQDLGENLSKPPSDPEANPEVSERKLPTEEEPAPVVEQSGKRKSKTKTIVEPPRKRQTKTKNIVEPPRKRQTKTKNIVEPLRKRKAKTKNVSVTPGHKKRGPSKKKPGAAKVEKRKTRTPKCKVPGCFLQDLEKSKKYSGKNLKRNKDELVQRIYDLFNRSVCDKKLPEKLRIGWNNKMVKTAGLCSTGEMWYPKWRRFAKIQIGLKVCDSADRIRDTLIHEMCHAASWLIDGIHDSHGDAWKYYARKSNRIHPELPRVTRCHNYKINYKVHYECTGCKTRIGCYTKSLDTSRFICAKCKGSLVMVPLTQKDGTRIVPHV

SEQ ID NO: 532 - protein, 362 aa, Homo sapiens
LTTVVLLCLLTPSWTSTGRMWSHLNRLLFWSIFSSVTCRKAVLDCEAMKTNEFPSPCLDSKTKVVMKGQNVSMFCSHKNKSLQITYSLFRRKTHLGTQDGKGEPAIFNLSITEAHESGPYKCKAQVTSCSKYSRDFSFTIVDPVTSPVLNIMVIQTETDRHITLHCLSVNGSLPINYTFFENHVAISPAISKYDREPAEFNLTKKNPGEEEEYRCEAKNRLPNYATYSHPVTMPSTGGDSCPFCLKLLLPGLLLLLVVIILILAFWVLPKYKTRKAMRNNVPRDRGDTAMEVGIYANILEKQAKEESVPEVGSRPCVSTAQDEAKHSQELQYATPVFQEVAPREQEACDSYKSGYVYSELNF

SEQ ID NO: 533 - protein, 385 aa, Homo sapiens
AIQLAVPVAGIHHDFIQELNAGYGHCSLEDVYSAVHSSLDTGERTRGGHCGLRGRVQAQGGGCDEAQRPLGAHEEPREVVAGCTLPEMPASARRVQQPPVGQHHLQVEHVVPHGAVADRVGPRRPGGRHATERGVRAWVGNQRPLSRRWALRALRVTPGSTTTEKSSWFSSRIRSICVRLTQTPPWLGQVLRPLQTWVSDLATSPDHTPRVSPQQPDQTPRGRQPTGGSRPKVPCVAGEAATGVPRCAGTILGPGEGAPLYLHSTDATLKPGAGAEWDDGHTLAIAQGCQPADLLHVLGPHHSIRRFAPVHRLIAPVLLSDHRGSGHVGAAHHGLQSLYEVPAELSLCLLGAVAPPGEQLPGCRPEQSGHSQALARGCEHWVAGC

SEQ ID NO: 534 - protein, 224 aa, Homo sapiens
  SITE (194): Xaa equals any of the naturally occurring L-amino acids
  SITE (197): Xaa equals any of the naturally occurring L-amino acids
  SITE (202): Xaa equals any of the naturally occurring L-amino acids
  SITE (208): Xaa equals any of the naturally occurring L-amino acids
  SITE (210): Xaa equals any of the naturally occurring L-amino acids
  SITE (215): Xaa equals any of the naturally occurring L-amino acids
GQELPGAWFAAGPSGIVTGGATGIGKAIVKELLELGSNVVIASRKLERLKSAADELQANLPPTKQARVIPIQCNIRNEEEVNNLVKSTLDTFGKINFLVNNGGGQFLSPAEHISSKGWHAVLETNLTGTFYMCKAVYSSWMKEHGGSIVNIIVPTKAGFPLAVHSGAARAGVYNLTKSLALEWACSGIRINCVXPGXYLFPXCLWENXGXLGTNXLKVFSEKPR

SEQ ID NO: 535 - protein, 265 aa, Homo sapiens
  SITE (43): Xaa equals any of the naturally occurring L-amino acids
RPRTGREKVAMAAVDSFYLLYREIARSCNCYMEALALVGAWYXARKSITVICDFYSLIRLHFIPRLGSRADLIKQYGRWAVVSGATDGIGKAYAEELASRGLNIILISRNEEKLQVVAKDIADTYKVETDIIVADFSSGREIYLPIREALKDKDVGILVNNVGVFYPYPQYFTQLSEDKLWDIINVNIAAASLMVHVVLPGMVERKKGAIVTISSGSCCKPTPQLAAFSASKAYLDHFSRALQYEYASKGIFVQSLIPFLCRPPA

SEQ ID NO: 536 - protein, 141 aa, Homo sapiens
  SITE (130): Xaa equals any of the naturally occurring L-amino acids
  SITE (140): Xaa equals any of the naturally occurring L-amino acids
EREMLQAPRGRARAALRRLAVATRTMAGGSLALGSVTVHSSEPEVRIPENNPVKLSCAYSGFSSPRVEWKFDQGDTTRLVCYNNKITASYEDRVTFLPTGITFKSVTREDTGTYTCMVSEEGGNSYGESXSSSSCLCLHXG

SEQ ID NO: 537 - protein, 591 aa, Homo sapiens
HELKPAKIDHKQYFRKQVLHGKDFQVDCKASGSPVPEISWSLPDGTMINNAMQADDSGHRTRRYTLFNNGTLYFNKVGVAEEGDYTCYAQNTLGKDEMKVHLTVITAAPRIRQSNKTNKRIKAGDTAVLDCEVTGDPKPKIFWLLPSNDMISFSIDRYTFHANGSLTINKVKLLDSGEYVCVARNPSGDDTKMYKLDVVSKPPLINGLYTNRTVIKATAVRHSKKHFDCRAEGTPSPEVMWIMPDNIFLTAPYYGSRITVHKNGTLEIRNVRLSDSADFICVARNEGGESVLVVQLEVLEMLRRPTFRNPFNEKIVAQLGKSTALNCSVDGNPPPEIIWILPNGTRFSNGPQSYQYLIASNGSFIISKTTREDAGKYRCAARNKVGYIEKLVILEIGQKPVILTYAPGTVKGISGESLSLHCVSDGIPKPNIKWTMPSGYVVDRPQINGKYILHDNGTLVIKEATAYDRGNYICKAQNSVGHTLITVPVMIVAYPPRITNRPPRSIVTRTGAAFQLHCVALGVPKPEITWEMPDHSLLSTASKERTHGSEQLHLQGTLVIQNPQTSDSGIYKCTAKNPLGSDYAATYIQVI

SEQ ID NO: 538 - protein, 130 aa, Homo sapiens
  SITE (12): Xaa equals any of the naturally occurring L-amino acids
  SITE (47): Xaa equals any of the naturally occurring L-amino acids
  SITE (65): Xaa equals any of the naturally occurring L-amino acids
  SITE (68): Xaa equals any of the naturally occurring L-amino acids
ADQGSYRCIVSXWIAEQGNWQEIQEKAVEVATVVIQPTVLRAAVPKXVSVAEGKELDLTCNITTXRAXDVRPEVTWSFSRMPDSTLPGSRVLARLDRGFPGAQLASCCFESCGCTLLPFTGSGMLAKKTL

SEQ ID NO: 539 - protein, 153 aa, Homo sapiens
  SITE (9): Xaa equals any of the naturally occurring L-amino acids
CSRIDSSIXTNASYQCEMLIIGETGCRAYRKSLYYLCSNSVNQKLLVHLLKKNLLGKLPEVFHAHNKQGKCNQENSNMRLNQLTGCSTIIMPCAQSFTETITRNISLLSPQLLYQDKMAKDIGLKHLLKSISSDLITLGQQAFSLKRGQRKVL

SEQ ID NO: 540 - protein, 301 aa, Homo sapiens
HASEIASCVCSQESFGGCCVSGLIAMGTKAQVERKLLCLFILAILLSVKLSCAYSGFSSPRVEWKFDQGDTTRLVCYNNKITASYEDRVTFLPTGITFKSVTREDTGTYTCMVSEEGGNSYGEVKVKLIVLVPPSKPTVNIPSSATIGNRAVLTCSEQDGSPPSEYTWFKDGIVMPTNPKSTRAFSNSSYVLNPTTGELVFDPLSASDTGEYSCEARNGYGTPMTSNAVRMEAVERNVGVIVAAVLVTLILLGILVFGIWFAYSRGHFDRTKKGTSSKKVIYSQPSARSEGEFKQTSSFLV

SEQ ID NO: 541 - protein, 432 aa, Homo sapiens
GTCTAIKADSYICLCPLGFKGRHCEDAFTLTIPQFRESLRSYAATPWPLEPQHYLSFMEFEITFRPDSGDGVLLYSYDTGSKDFLSINLAGGHVEFRFDCGSGTGVLRSEDPLTLGNWHELRVSRTAKNGILQVDKQKIVEGMAEGGFTQIKCNTDIFIGGVPNYDDVKKNSGVLKPFSGSIQKIILNDRTIHVKHDFTSGVNVENAAHPCVRAPCAHGGSCRPRKEGYDCDCPLGFEGLHCQKAIIEAIEIPQFIGRSYLTYDNPDILKRVSGSRSNVFMRFKTTAKDGLLLWRGDSPMRPNSDFISLGLRDGALVFSYNLGSGVASIMVNGSFNDGRWHRVKAVRDGQSGKITVDDYGARTGKSPGMMRQLNINGALYVGGMKEIALHTNRQYMRGLVGCISHFTLSTDYHISLVEDAVDGKNINTCGAK

SEQ ID NO: 542 - protein, 310 aa, Homo sapiens
AFEAGGGEERVGLLYRDPLPMWICPGGGGGGGDREDARLRPALLWALLALWLCCATPAHALQCRDGYEPCVNEGMCVTYHNGTGYCKCPEGFLGEYCQHRDPCEKNRCQNGGTCVAQAMLGKATCRCASGFTGEDCQYSTSHPCFVSRPCLNGGTCHMLSRDTYECTCQVGFTGKECQWTDACLSHPCANGSTCTTVANQFSCKCLTGFTGQKCETDVNECDIPGHCQHGGTCLNLPGSYQCQCLQGFTGQYCDSLYVPCAPSPCVNGGTCRQTGDFTFECNCLPETVRRGTELWERDREVWNGKEHDEN

SEQ ID NO: 543 - protein, 156 aa, Homo sapiens
  SITE (119): Xaa equals any of the naturally occurring L-amino acids
  SITE (120): Xaa equals any of the naturally occurring L-amino acids
  SITE (133): Xaa equals any of the naturally occurring L-amino acids
  SITE (142): Xaa equals any of the naturally occurring L-amino acids
  SITE (156): Xaa equals any of the naturally occurring L-amino acids
PQSLALQQSTSPASRSLGTSPSPQTTVVSTAEDLAPKSATFAVQSSTQSPTTLSSSASVNSCAVNPCLHNGECVADNTSRGYHCRCPPSWQGDDCSVDVNECLSNPCPSTATCNNTQGXXICKCPVGYQLEKXICNLGKRLXLFRTLFRTTIYFTX

SEQ ID NO: 544 - protein, 110 aa, Homo sapiens
  SITE (35): Xaa equals any of the naturally occurring L-amino acids
  SITE (38): Xaa equals any of the naturally occurring L-amino acids
  SITE (57): Xaa equals any of the naturally occurring L-amino acids
  SITE (60): Xaa equals any of the naturally occurring L-amino acids
  SITE (63): Xaa equals any of the naturally occurring L-amino acids
  SITE (78): Xaa equals any of the naturally occurring L-amino acids
HAEFLCLLNPSGATCVCPEGKYLINGTCNDDSLLXDSXKLTCENGGRCILNEKGDLXCHXWPXYSGERCEVNHCSNYXQNGGTCVPSVLGRPTCSCALGFTGPNCGKDSL

SEQ ID NO: 545 - protein, 177 aa, Homo sapiens
  SITE (125): Xaa equals any of the naturally occurring L-amino acids
ALIRLTIGKAGTPAGTGPEFPGRPTRPHMLVQGLEPNTKYEFAVRLHVDQLSSPWSPVVYHSTLPEAPAGPPVGVKVTLIEDDTALVSWKPPDGPETVVTRYTILYASRKAWIAGEWQVLHREGXITMALLENLVAGNVYIVKISASNEVGEGPFSNSVELAVLPKETSESNQSPSV

SEQ ID NO: 546 - protein, 209 aa, Homo sapiens
  SITE (209): Xaa equals any of the naturally occurring L-amino acids
GIFSYIIQEYLCTVQTTLESLSAVADIIVRGPPGPPEDVQVEDISSTTSQLSWRAGPDNNSPIQIFTIQTRTPFSVGWQAVATVPEILNGKTYNATVVGLSPWVEYEFRVVAGNSIGIGEPSEPSELLRTKASVPVVAPVNIHGGGGSRSELVITWESIPEELQNGEGFGYIIMFRPVGSTTWSKEKVSSVESSRFVYRNESIIPLSPX

SEQ ID NO: 547 - protein, 309 aa, Homo sapiens
  SITE (254): Xaa equals any of the naturally occurring L-amino acids
  SITE (292): Xaa equals any of the naturally occurring L-amino acids
IINVTKSDAGSYTCIATNHFGTASSTGNLVVKDPTRVMVPPSSMDVTVGESIVLPCQVTHDHSLDIVFTWSFNGHLIDFDRDGDHFERVGGQDSAGDLMIRNIQLKHAGKYVCMVQTSVDRLSAAADLIVRGPPGPPEAVTIDEITDTTAQLSWRPGPDNHSPITMYVIQARTPFSVGWQAVSTVPELIDGKTFTATVVGLNPWVEYEFRTVAANVIGIGEPSRPSEKRRTEEALPEVTPANVSGGGGSKSELXITWETVPEELQNGRGFGYVVAFRPYGKMIWMLTVLASXDASRYVFRNESVHPSLL

SEQ ID NO: 548 - protein, 76 aa, Homo sapiens
  SITE (76): Xaa equals any of the naturally occurring L-amino acids
HYRRYACRYRSGIPGSTHASEVIMTAYNIIGESPASAPVEVFVGEAAPAMAPQNVQVTPLTASQLEVTWDPPPPEX

SEQ ID NO: 549 - protein, 84 aa, Homo sapiens
ISCSWRVVKHLRIYGNSLRHLVNMNSVILAYPVEMFSEVMVPLLFFGVHFGLSFFHLFHSYLSPSLKKNLFGNTEVFILEIVVH

SEQ ID NO: 550 - protein, 186 aa, Homo sapiens
  SITE (76): Xaa equals any of the naturally occurring L-amino acids
  SITE (152): Xaa equals any of the naturally occurring L-amino acids
  SITE (158): Xaa equals any of the naturally occurring L-amino acids
  SITE (165): Xaa equals any of the naturally occurring L-amino acids
  SITE (168): Xaa equals any of the naturally occurring L-amino acids
  SITE (169): Xaa equals any of the naturally occurring L-amino acids
  SITE (173): Xaa equals any of the naturally occurring L-amino acids
QIDEFVHTESSSTKMQLVKQRLETVTEVIRSCAAKVNKNLSFTSPPAVSSQQSKLKQSNMLTAQEILHQFGFTQTXIISIERKPCNHQVDTAPTVVALYDYTANRSDELTIHRGDIIRVFFKDNEDWWYGSIGKGQEGYFPANHVASETLYXELPPEXKERSPPXSPXXKTKXEKSPASQKVQYNT

SEQ ID NO: 551 - protein, 570 aa, Homo sapiens
GTRPCARAECDTRRDCLAKLIYARLFDWLVSVINSSICADTDSWTTFIGLLDVYGFESFPDNSLEQLCINYANEKLQQHFVAHYLRAQQEEYAVEGLEWSFINYQDNQPCLDLIEGSPISICSLINEECRLNRPSSAAQLQTRIETALAGSPCLGHNKLSREPSFIVVHYAGPVRYHTAGLVEKNKDPIPPELTRLLQQSQDPLLMGLFPTNPKEKTQEEPPGQSRAPVLTVVSKFKASLEQLLQVLHSTTPHYIRCIKPNSQGQAQTFLQEEVLSQLEACGLVETIHISAAGFPIRVSHRNFVERYKLLRRLHPCTSSGPDSPYPAKGLPEWCPHSEEATLEPLIQDILHTLPVLTQAAAITGDSAEAMPAPMHCGRTKVFMTDSMLELLECGRARVLEQCARCIQGGWRRHRHREQERQWRAVMLIQAAIRSWLTRKHIQRLHAAATVIKRAWQKWRIRMACLAAKELDGVEEKHFSQAPCSLSTSPLQTRLLEAIIRFWPLGLVLANTAMGVGSFQRKLVVWACLQLPRGSPSSYTVQTAQDQAGVTSIRALPQGSIKFHCRKSPLR

SEQ ID NO: 552 - protein, 298 aa, Homo sapiens
HQMFPVRLLVSPRRPEAELPLHRRKAEAGRSTASQVSISPAAGPADPRGPESESGDERAQGALAGGTQRPVARGRTLSLGVPGGAGQGHPSGLLVPHSPASPGAPGSPQRRGPFSRSQQTAPSAQRTQQPQEQQQQHRDSRHRREDPGPNRGRRSPRPGAAAHVGPVEGRRGGLGRALGGLWVLSGVLQPAVGEREALRVTARVASEGEQQRGSAQAQRPGRRWAGAIEVAEQAARSRVAQLQPVARVGQLEEAEGELQRGAWRAQGPAAVPVRPVLVREVRGVDDALRRCPVPLAGR

SEQ ID NO: 553 - protein, 221 aa, Homo sapiens
RERETDVHGMATGTRYAGKVVVVTGGGRGIGAGIVRAFVNSGARVVICDKDESGGRALEQELPGAVFILCDVTQEDDVKTLVSETIRRFGRLDCVVNNAGHHPPPQRPEETSAQGFRQLLELNLLGTYTLTKLALPYLRKSQGNVINISSLVGAIGQAQAVPYVATKGAVTAMTKALALDESPYGVRVNCHWAAWASPLRSGLRQCSWPPKPTSARALNCS

SEQ ID NO: 554 - protein, 1766 aa, Homo sapiens
  SITE (533): Xaa equals any of the naturally occurring L-amino acids
TAEEHLAAYSVSDSDSGKDPSMECCRRATPGTLLLFLAFLLLSSRTARSEEDRDGLWDAWGPWSECSRTCGGGASYSLRRCLSSKSCEGRNIRYRTCSNVDCPPEAGDFRAQQCSAHNDVKHHGQFYEWLPVSNDPDNPCSLKCQAKGTTLVVELAPKVLDGTRCYTESLDMCISGLCQIVGCDHQLGSTVKEDNCGVCNGDGSTCRLVRGQYKSQLSATKSDDTVVAIPYGSRHIRLVLKGPDHLYLETKTLQGTKGENSLSSTGTFLVDNSSVDFQKFPDKEILRMAGPLTADFIVKIRNSGSADSTVQFIFYQPIIHRWRETDFFPCSATCGGGYQLTSAECYDLRSNRVVADQYCHYYPENIKPKPKLQECNLDPCPARWEATPWTACSSSCGGGIQSRAVSCVEEDIQGHVTSVEEWKCMYTPKMPIAQPCNIFDCPKWLAQEWSPCTVTCGQGLRYRVVLCIDHRGMHTGGCSPKTKPHIKEECIVPTPCYKPKEKLPVEAKLPWFKQAQELEEGAAVSEEPSFIPXAWSACTVTCGVGTQVRIVRCQVLLSFSQSVADLPIDECEGPKPASQRACYAGPCSGEIPEFNPDETDGLFGGLQDFDELYDWEYEGFTKCSESCGGGVQEAVVSCLNKQTREPAEENLCVTSRRPPQLLKSCNLDPCPARWEIGKWSPCSLTCGVGLQTRDVFCSHLLSREMNETVILADELCRQPKPSTVQACNRFNCPPAWYPAQWQPCSRTCGGGVQKREVLCKQRMADGSFLELPETFCSASKPACQQACKKDDCPSEWLLSDWTECSTSCGEGTQTRSAICRKMLKTGLSTVVNSTLCPPLPFSSSIRPCMLATCARPGRPSTKHSPHIAAARKVYIQTRRQRKLHFVVGGFAYLLPKTAVVLRCPARRVRKPLITWEKDGQHLISSTHVTVAPFGYLKIHRLKPSDAGVYTCSAGPAREHFVIKLIGGNRKLVARPLSPRSEEEVLAGRKGGPKEALQTHKHQNGIFSNGSKAEKRGLAANPGSRYDDLVSRLLEQGGWPGELLASWEAQDSAERNTTSEEDPGAEQVLLHLPFTMVTEQRRLDDILGNLSQQPEELRDLYSKHLVAQLAQEIFRSHLEHQDTLLKPSERRTSPVTLSPHKHVSGFSSSLRTSSTGDAGGGSRRPHRKPTILRKISAAQQLSASEVVTHLGQTVALASGTLSVLLHCEAIGHPRPTISWARNGEEVQFSDRILLQPDDSLQILAPVEADVGFYTCNATNALGYDSVSIAVTLAGKPLVKTSRMTVINTEKPAVTVDIGSTIKTVQGVNVTINCQVAGVPEAEVTWFRNKSKLGSPHHLHEGSLLLTNVSSSDQGLYSCRAANLHGELTESTQLLILDPPQVPTQLEDIRALLAATGPNLPSVLTSPLGTQLVLDPGNSALLGCPIKGHPVPNITWFHGGQPIVTATGLTHHILAAGQILQVANLSGGSQGEFSCLAQNEAGVLMQKASLVIQDYWWSVDRLATCSASCGNRGVQQPRLRCLLNSTEVNPAHCAGKVRPAVQPIACNRRDCPSRWMVTSWSACTRSCGGGVQTRRVTCQKLKASGISTPVSNDMCTQVAKRPVDTQACNQQLCVEWAFSSWGQCNGPCIGPHLAVQHRQVFCQTRDGITLPSEQCSALPRPVSTQNCWSEACSVHWRVSLWTLCTATCGNYGFQSRRVECVHARTNKAVPEHLCSWGPRPANWQRCNITPCENMECRDTTRYCEKVKQLKLCQLSQFKSRCCGTCGKA

SEQ ID NO: 555 - protein, 152 aa, Homo sapiens
DWTRSSPQWLGLRRGMGFFSKETPFSSTLVPAQETPRSFECTCPRGFYGLRCEVSGVTCADGPCFNGGLCVGGADPDSAYICHCPPGFQGSNCEKRVDRCSLQPCRNGEAWRPERRGMGWGSWMAQTVQGWNPGFDSSNPRAWGPDLPPASL

SEQ ID NO: 556 - protein, 124 aa, Homo sapiens
  SITE (56): Xaa equals any of the naturally occurring L-amino acids
ITRNTRNKGACSSRRSVSPWRTEFIICVLSLGSLAFADACTSSSVTPKMFVHFLSXNHMISLVGCMIQFYIFASGANTGSFLLVVMAYDCYMAICNPLLYPLVMSNTFCIQLSGVSFIIVFFIL

SEQ ID NO: 557 - protein, 176 aa, Homo sapiens
  SITE (133): Xaa equals any of the naturally occurring L-amino acids
AQIYSVAIFLGINLAAFIIIVFSYGSMFYSVHQSAITATEIRNQVKKEMILAKRFFFIVFTDALCWIPIFVVKFLSLLQVEIPGTITSWVVIFILPINSALNPILYTLTTRPFKEMIHRFWYNYRQRKSMDSXGQKTYAPSFIWVEMWPLQEMPPELMKPDLFTYPCEMSLISQST

SEQ ID NO: 558 - protein, 203 aa, Homo sapiens
LEPPASDPELQPAERPLPSPGSGEGAPVFLTGPRSQWVLRGAEVVLTCRAGGLPEPTLYWEKDGMALDEVWDSSHFALQPGRAEDGPGASLALRILAARLPDSGVYVCHARNAHGHAQAGALLQVHQPPESPPADPDEAPAPVVEPLKCAPKTFWVNEGKHAKFRCYVMGKPEPEIEWHWEGRPLLPDRRRLMYRDRDGGFVL

SEQ ID NO: 559 - protein, 278 aa, Homo sapiens
KRAKLLISCNISPPLNLNPVWFKQHCAYTIAKYGMSMYVLGMAEEFKGEIAVNALWPKTAIHTAAMDMLGGPGIESQCRKVDIIADAAYSIFQKPKSFTGNFVIDENILKEEGIENFDVYAIKPGHPLQPDFFLDEYPEAVSKKVESTGAVPEFKEEKLQLQPKPRSGAVEETFRIVKDSLSDDVVKATQAIYLFELSGEDGGTWFLDLKSKGGNVGYGEPSDQADVVMSMTTDDFVKMFSGKLKPTMAFMSGKLKIKGNMALAIKLEKLMNQMNARL

SEQ ID NO: 560 - protein, 139 aa, Homo sapiens
SFKGPGPSQGEVRLGAGFYDNEGGSADCLAQRVLSHSLVLPAVLRGYAGDGEGAHAQQVSAVHRGVSFQAAVILEPGDVGPGRALHGTAHAALAALGQQVGPQAHQEPGLLAQVGLPVARSLHCEPVALPGDAPGLAGV

SEQ ID NO: 561 - protein, 281 aa, Homo sapiens
GTSIIFAGGDKWSVDPRVSISTLNKRDYSLQIQNVDVTDDGPYTCSVQTQHTPRTMQVHLTVQVPPKIYDISNDMTVNEGTNVTLTCLATGKPEPSISWRHISPSAKPFENGQYLDIYGITRDQAGEYECSAENDVSFPDVRKVKVVVNFAPTIQEIKSGTVTPGRSGLIRCEGAGVPPPAFEWYKGEKKLFNGQQGIIIQNFSTRSILTVTNVTQEHFGNYTCVAANKLGTTNASLPLNPPSTAQYGITGSADVLFSCWYLVLTLSSFTSIFYLKNAILQ

SEQ ID NO: 562 - protein, 254 aa, Homo sapiens
  SITE (2): Xaa equals any of the naturally occurring L-amino acids
YXFPVDPRADMELFLAGRRVLVTGAGKGIGRGTVQALHATGARVVAVSRTQADLDSLVRECPGIEPVCVDLGDWEATERALGSVGPVDLLVNNAAVALLQPFLEVTKEAFDRSFEVNLRAVIQVSQIVARGLIARGVPGAIVNVSSQCSQRAVTNHSVYCSTKGALDMLTKVMALELGPHKIRVNAVNPTVVMTSMGQATWSDPHKAKTMLNRIPLGKFAEVEHVVNAILFLLSDRSGMTTGSTLPVEGGFWAC

SEQ ID NO: 563 - protein, 174 aa, Homo sapiens
  SITE (70): Xaa equals any of the naturally occurring L-amino acids
QSLPPPAGPGTFHFHYQAYLLSCHFPRRPAYGDVTVTSLHPGGSARFHCATGYQLKGARHLTCLNATQPXWDSKEPVCIAACGGVIRNATTGRIVSPGFPGNYSNNLTCHWLLEAPEGQRLHLHFEKVSLAEDDDRLIIRNGDNVEAPPVYDSYEVEYPPPPPPLQPHYHRVSV

SEQ ID NO: 564 - protein, 430 aa, Homo sapiens
QEFGTSTIQNRADLVINEVMWWDHGVYYCTIEAPGDTSGDPDKEVKLIVLHWLTVIFIILGALLLLLLIGVCWCQCCPQYCCCYIRCPCCPAHCCCPEEALARHRYMKQAQALGPQMMGKPLYWGADRSSQVSSYPMHPLLQRDLSLPSSLPQMPMTQTTNQPPIANGVLEYLEKELRNLNLAQPLPPDLKGRFGHPCSMLSSLGSEVVERRIIHLPPLIRDLSSSRRTSDSLHQQWLTPIPSRPWDLREGRSHHHYPDFHQELQDRGPKSWALERRELDPSWSGRHRSSRLNGSPIHWSDRDSLSDVPSSSEARWRPSHPPFRSRCQERPRRPSPRESTQRHGRRRRHRSYSPPLPSGLSSWSSEEDKERQPQSWRAHRRGSHSPHWPEEKPPSYRSLDITPGKNSRKKGSVERRSEKDSSHSGRSVVI

SEQ ID NO: 565 - protein, 93 aa, Homo sapiens
  SITE (46): Xaa equals any of the naturally occurring L-amino acids
  SITE (55): Xaa equals any of the naturally occurring L-amino acids
HLMSPKLGFDAFLDPGLYRWNHLCCDTFSFSYCGSREIAHFFCELXPTNPLMHEXQYLKGYFHCSIVMLVSLLHHMFLCWSYLAVITWIWRGG

SEQ ID NO: 566 - protein, 192 aa, Homo sapiens
  SITE (178): Xaa equals any of the naturally occurring L-amino acids
GGNVATNAGGLRFLRYGSLHGTVLGLEVVLADGTVLDCLTSLRKDNTGYDLKQLFIGSEGTLGIITTVSILCPPKPRAVNVAFLVTCVPPACGPGSPRPARLPHPALRTPGCPGFAEVLQTFSTCKGMLGEILSAFEFMDAVCMQLVGRHLHLASPVQESPFYVLIETSGSNAGHDAXKLGHFWSTRWAPAW

SEQ ID NO: 567 - protein, 180 aa, Homo sapiens
  SITE (146): Xaa equals any of the naturally occurring L-amino acids
  SITE (152): Xaa equals any of the naturally occurring L-amino acids
  SITE (164): Xaa equals any of the naturally occurring L-amino acids
  SITE (171): Xaa equals any of the naturally occurring L-amino acids
  SITE (175): Xaa equals any of the naturally occurring L-amino acids
PLTLSMANTTGEPEEVSGALSPPSASAYVKLVLLGLIMCVSLAGNAILSLLVLKERALHKAPYYFLLDLCLADGIRSAVCFPFVLASVRHGSSWTFSALSCKIVAFMAVLFCFHAAFMLFCISVTRYMAIAHHRFYAKRMTLWTCXAASAWXGPCLWPWPFHLXLTWAPTXYSGXGPVHL

SEQ ID NO: 568 - protein, 482 aa, Homo sapiens
  SITE (188): Xaa equals any of the naturally occurring L-amino acids
  SITE (194): Xaa equals any of the naturally occurring L-amino acids
  SITE (215): Xaa equals any of the naturally occurring L-amino acids
  SITE (281): Xaa equals any of the naturally occurring L-amino acids
ERPLEINPTKGNKSWSSTAVAAALELVDPPGCRNSARAGILSVSHPTLPSAHQPPVIPATHPALSREHECVEEVDGHVSCRCTEGFRLAADGRSCEDPCAQAPCEQQCEPGGPQGYSCHCRLGFRPAEDDPHRCVDTDECQIAGVCQQMCVNYVGGFECYCSEGHELEADGISCSPAGAMGAQASQDXGDELLXDGEDEEDEDEAWKAFNGGWTXMPGILWMEPTQPPDFALAYRPSFPEDREPQIPYPEPTWPPPLSAPRVPYHSSVLSVTRPVVVSATXPTLPSAHQPPVIPATHPALSRDHQIPVIAANYPDLPSAYQPGILSVSHSAQPPAATQPAALPTLLPSQSPTNQTSPISPTHPHSKAPQIPREDGPSPKLALWLPSPAPTAAPTALGEAGLAEHSQRDDRWLLVALLVPTCVFLVVLLALGIVYCTRCGPHAPNKRITDCYRWVIHAGSKSPTEPMPPRGSLTGVQTCRTSV

SEQ ID NO: 569 - protein, 163 aa, Homo sapiens
  SITE (2): Xaa equals any of the naturally occurring L-amino acids
  SITE (131): Xaa equals any of the naturally occurring L-amino acids
  SITE (153): Xaa equals any of the naturally occurring L-amino acids
SXRQYRPNSRSTHASGFYVLDSSEYNFHILSSFVLIEHSSMPVEKNITLERPSNVNLTCQFTTSGDLNAVNVTWKKDGEQLENNYLVSATGSTLYTQYRFTIINSKQMGSYSCFFREEKEQRGTLISKSLXFMGKNKPLISYVGDSTVLTCKXQIVSLNWTGT

SEQ ID NO: 570 - protein, 356 aa, Homo sapiens
  SITE (158): Xaa equals any of the naturally occurring L-amino acids
AGRQESGCPSGSPTSCSWLPCCRRPAVEAALPHSHCHHAQQYQQHCQPHTQRDGHPGEAGRQAHGELAAAAHKAIRAVAHKGVCGEVGVAGGPVEAGTRGTGIDGCPHLTASAREAGRAGAHEPILQVMASATVGARVTGTVADVEFTVGARESRTAXAHAAWTSVQALSPVGTGVAGAPVHFLLAVGAGEVGGTFTSIVGPLVALPAGAPIEAGGVGAAQGAVFTMQAIVARRTQAVVAILLVLTAASIATGVAVTLAELQLTVHTSVAWATGAGVASLPTVGARCPILAWGVVGAVVEILVTKQASPALITSTLPGSAAGAVATAIVGDAFVRTRGSTREFRTGTCRRTFYSVT

SEQ ID NO: 571 - protein, 191 aa, Homo sapiens
KASWMEVVQVLTKPAGNPSCMYPQGTFVIPLLVTAHRDPTQFKDPDCFNPTNFLDKGKFQGNDAFMPFASGAGRGGRGPAWTGSGVPGAHCAPVYPAKQMCLGTGLAHSGIFLFLTATLQRFCLLPVVRPGTINLTCSALAWAVSPQTSSSSQWPAEVRLHYGGLTGPQTSIPSSVNKGPKLQKKKKKKKK

SEQ ID NO: 572 - protein, 186 aa, Homo sapiens
GTSLHVGVCSHMEYPCRFQNASATTQEIIPHRVFAPVCLTGACQETLLRLIPPCLSAAHSVLGAHPFSRLDVLIVPANFPSLGMASPHIMFLSQSILTGGNHLCGTRLCHEIAHAWFGLAIGARDWTEEWLSEGFATHLEDVFWATAQQLAPYEAREQQELRACLRWRRLQDEMQCSPEEMQVLSS

SEQ ID NO: 573 - protein, 124 aa, Homo sapiens
SVTAKLIILIIFIFIFWVGTGSHSVAQAGVQWHELGSLQTPPHRFKQLSCFSLLSSWDYSVNHHTQLIFVFLVEIGFYHVGQAGLEFLTSNDPPTSSSQSTGIAVVNHHVWPKFINNIKYTLAT

SEQ ID NO: 574 - protein, 115 aa, Homo sapiens
  SITE (115): Xaa equals any of the naturally occurring L-amino acids
TGCLCWAMLFSDLPPSPPGPQIVSHPYDTWNVTGQDVIFGCEVFAYPMASIEWRKDGLDIQLPGDDPHISVQFRGGPQRFEVTGWLQIQAVRPSDEGTYRCLARNALGKWRPLLX

SEQ ID NO: 575 - protein, 74 aa, Homo sapiens
  SITE (1): Xaa equals any of the naturally occurring L-amino acids
XLGIEIINYFLISLLSSGERIGLEQALQCRDGYEPCVNEGMCVTYHNGTGYCKCPEGFLGEYCQHRDPCEKNRC

SEQ ID NO: 576 - protein, 287 aa, Homo sapiens
  SITE (36): Xaa equals any of the naturally occurring L-amino acids
ASCAPTTQVSIAVRSSTASMTAATLWEVKVKGVVFXYREGSARYAFSFSGAQEACARIGAHIATPEQLYAAYLGGYEQCDAGWLSDQTVRYPIQTPREACYGDMDGFPGVRNYGVVDPDDLYDVYCYAEDLNGELFLGDPPEKLTLEEARAYCQERGAEIATTGQLYAAWDGGLDHCSPGWLADGSVRYPIVTPSQRCGGGLPGVKTLFLFPNQTGFPNKHSRFNVYCFRDSAQPSAIPEASNPASNPASDGLEAIVTVTETLEELQLPQEAQRVNPVGPSTHPHHG

SEQ ID NO: 577 - protein, 449 aa, Homo sapiens
  SITE (15): Xaa equals any of the naturally occurring L-amino acids
APERRSPGPAPRAPXLVGRGDCDPLLSVCLTTMPLYEGLGSGGEKTAVVIDLGEAFTKCGFAGETGPRCIIPSVIKRAGMPKPVRVVQYNINTEELYSYLKEFIHILYFRHLLVNPRDRRVVIIESVLCPSHFRETLTRVLFKYFEVPSVLLAPSHLMALLTLGINSAMVLDCGYRESLVLPIYEGIPVLNCWGALPLGGKALHKELETQLLEQCTVDTSVAKEQSLPSVMGSVPEGVLEDIKARTCFVSDLKRGLKIQAAKFNIDGNNERPSPPPNVDYPLDGEKILHILGSIRDSVVEILFEQDNEEQSVATLILDSLIQCPIDTRKQLAENLVVIGGTSMLPGFLHRLLAEIRYLVEKPKYKKALGTKTFRIHTPPAKANCVAWLGGAIFGALQDILGSRSVSKEYYNQTGRIPDWCSLNNPPLEMMFDVGKTQPPLMKRAFSTEK

SEQ ID NO: 578 - protein, 88 aa, Homo sapiens
AFEHTTITSSWQIKEGGGKRGLIVVMAHEMIGTQIVTERLVALLESGTEKVLLIDSRPFVEYNTSHILEAININCSKLMKRSCNRTKC

SEQ ID NO: 579 - protein, 251 aa, Homo sapiens
  SITE (224): Xaa equals any of the naturally occurring L-amino acids
ADNVTVVQRHQRGFVAVLVVHVVDDVQCSDVLFSQPVHEVIHALHHFIIVQDIAFDRFRLRTNLHFQFFVNAAVDCVQHGFRQVCTRTEELHLFTNDHRAYAASNSVVIVVEVRTHQVIVLILQRRGVDGHLAANFLKFSGSFSDHRMVMFGSGDGPMVYRVFRKRKLFLVTRVRPSRPIPPIDSVAQIGSPENSSSYSGVRRKRTIRSFMTRWSTISCASCSXILPAFRSRSMYTSRKVEVRPKDIAAPF

SEQ ID NO: 580 - protein, 101 aa, Homo sapiens
AVLGHEGAGIVVEVGEGVTSVVPGDHVIPLYTAECGECLFCKSGKTNLCVAVRATQGKGVMPDRTTRFSYNGQPIFHYMGCSTFSEYTVVAEVSLAKITRA

SEQ ID NO: 581 - protein, 155 aa, Homo sapiens
RLLRTRPGQCPSLQKPSGQLRQEELQTTACEAGVDFVYKTKLESVEVSASNPYVYYNTQLEDIIKSGTDPATPLAMKKFVSHATCHDSLGLQEQESYLIMGQTSDLWRIKSDYSYVLGKETFLILWPADGDASKKELRDQLEEFLEYMRTHGCQS

SEQ ID NO: 582 - protein, 158 aa, Homo sapiens
IPVRYLPWADLSFLLGHPIPTVLQATLKYNVLLPKKASGFSLSLEIVKNYSLTVFDLTVNLKYTGIRNKSSMVVIDVKMLSGFTPTMSSIEELENKGQVMKTEVKNDHVLFYLENVFGRADSFTFSVEQSNLVFNIQPAPGMVYDYYEKDGEAFLLTN

SEQ ID NO: 583 - protein, 531 aa, Homo sapiens
HASESVSLELPVDIVPDSTKAYVTVLGDIMGTALQNLDGLVQMPSGCGEQNMVLFAPIIYVLQYLEKAGLLTEEIRSRAVGFLEIGYQKELMYKHSNGSYSAFGERDGNGNTWLTAFVTKCFGQAQKFIFIDPKNIQDALKWMAGNQLPSGCYANVGNLLHTAMKGGVDDEVSLTAYVTAALLEMGKDVDDPMVSQGLWCLKNSATSTTNLYTQALLAYIFSLAGEMDIRNILLKQLDQQAIISGESIYWSQKPTPSSNASPWSEPAAVDVELTAYALLAQLTKPSLTQKEIAKATSIVAWLAKQRNAYGGFSSTQDTVVALQALAKYATTAYVPSEEINLVVKSTENFQRTFNIQSVNRLVFQQDTLPNVPGMYTLEASGQGCVYVQTVLRYNILPPTNMKTFSLSVEIGKARCEQPTSPRSLTLTIHTSYVGSRSSSNMAIVEVKMLSGFSPMEGTNQLLLQQPLVKKVEFGTDTLNIYLDELIKNTQTYTFTISQSVLVTNLKPATIKVYDYYLPDEQATIQYSDPCE

SEQ ID NO: 584 - protein, 175 aa, Homo sapiens
  SITE (16): Xaa equals any of the naturally occurring L-amino acids
  SITE (19): Xaa equals any of the naturally occurring L-amino acids
WFYPVMTMLGHPISPXTWXINESIDSMLEICIGFVVPFLIMGVCYFITERTLMKMPNIKISRPLKVLLTVVIVFIVTQLPYNIVKFCRAIDIIYSLITSCNMSKRMDIAIQVTESIALFHSCLNPILYVFMGASFKNYVMKVAKKYGSWRRQRQSVEEFPFDSEGPTEPTSTFSI

SEQ ID NO: 585 - protein, 301 aa, Homo sapiens
PRVRKECIYILEAAPRQRIELTFDEHYYIEPSFECRFDHLEVRDGPFGFSPLIDRYCGVKSPPLIRSTGRFMWIKFSSDEELEGLGFRAKYSFIPDPDFTYLGGILNPIPDCQFELSGADGIVRSSQVEQEEKTKPGQAVDCIWTIKATPKAKIYLRFLDYQMEHSNECKRNFVAVYDGSSSIENLKAKFCSTVANDVMLKTGIGVIRMWADEGSRLNRFRMLFTSFVEPPCTSSTFFCHSNMCINNSLVCNGVQNCAYPWDENHCKEKKKAGVFEQITKTHGTIIGITSGIVLVLLLFLF

SEQ ID NO: 586 - protein, 222 aa, Homo sapiens
  SITE (124): Xaa equals any of the naturally occurring L-amino acids
  SITE (145): Xaa equals any of the naturally occurring L-amino acids
CHKMASVAAARAVPVGSGLRGLQRTLPLVVILGATGTGKSTLALQLGQRLGGEIVSADSMQVYEGLDIITNKVSAQEQRICRHHMISFVDPLVTNYTVVDFRNRATALIEDIFARDKIPIVVGXTNYYIESLLWKVLVNTKPQEXGTEKVIDRKVELEKEDGLVLHKRLSQVDPEMAAKLHPHDKRKVARSLQVFEETGISHSEFLHRQHTGRKWWSPLEVL

SEQ ID NO: 587 - protein, 147 aa, Homo sapiens
ASPPWRLCCFFSLELFLHPVLRASSSTPIEGSPMTLTCETQLSPQRPDVQLQFSLFRDSQTLGLGWSRSPRLQIPAMWTEDSGSYWCEVETVTHSIKKRSLRSQIRVQSECLRGCSSRVRAGERKASDISCTPRMVDITERSVQLFW

SEQ ID NO: 588 - protein, 156 aa, Homo sapiens
VLECIERGVDLFESFFPYQVTERGCALTFSFDYQPNPEETLLQQNGTQEEIKCMDQIKKIETTGCNQEITSFEINLKEKKYQEDFNPLVRGCSCYCCKNHTRAYIHHLLVTNELLAGVLLMMHNFEHYFGFFHYIREALKSDKLAQLKELIHRQAS

SEQ ID NO: 589 - protein, 158 aa, Homo sapiens
PSRYSRRPEELRILECVLKETFRLFPLFPLFARSVSEDCEVAGYRVLKGTEAVIIPYALHRDPRYFPNPEEFQPERFFPENAQGRHPYAYVPFSAGPRNCIGQKFAVMEEKTILSCILRHFWIESNQKREELGLEGQLILRPSNGIWIKLKRRNADER

SEQ ID NO: 590 - protein, 302 aa, Homo sapiens
  SITE (158): Xaa equals any of the naturally occurring L-amino acids
  SITE (288): Xaa equals any of the naturally occurring L-amino acids
KSRTRACLLSPGLSCPSHCLSFFPRVRSFARAQRGGGVGDPTPAPGGRKPTLSRAPGNRRRSALRRAMEFSWLETRWARPFYLAFVFCLALGLLQAIKLYLRRQRLLRDLRPFPAPPTHWFLGHQKFIQDDNMEKLEEIIEKYPRAFPFWIGPFQAFXCIYDPDYAKTLLSRTDPKSQYLQKFSPPLLGKGLAALDGPKWFQHRRLLTPGFHFNILKAYIEVMAHSVKMMLDKWEKICSTQDTSVEVYEHINSMSLDIIMKCAFSKETNCQTNSTHDPYAKAILNSAXSYFTACTVCCITVT

SEQ ID NO: 591 - protein, 88 aa, Homo sapiens
  SITE (43): Xaa equals any of the naturally occurring L-amino acids
VKAEMQKHGEDPFCPFSIISNAVSNIICSLCFGQRFDYTNSEXKKMLGFMSRGLEICLNSQVLLVNICPWLYYLPFGPFKELRQLKRI

SEQ ID NO: 592 - protein, 183 aa, Homo sapiens
  SITE (170): Xaa equals any of the naturally occurring L-amino acids
PLTLSMANTTGEPEEVSGALSPPSASAYVKLVLLGLIMCVSLAGNAILSLLVLKERALHKAPYYFLLDLCLADGIRSAVCFPFVLASVRHGSSWTFSALSCKIVAFMAVLFCFHAAFMLFCISVTRYMAIAHHRFYAKRMTLWTCAAVICMAWTLSVAMAFPPVFDVGTXKFIREEDKCIFEH

SEQ ID NO: 593 - protein, 226 aa, Homo sapiens
  SITE (133): Xaa equals any of the naturally occurring L-amino acids
CVDGVAGYRCTCVKGFVGLHCETEVNECQSNPCLNNAVCEDQVGGFMCKCPPGFLGTRCGKNVDECLSQPCKNGATCKDGANSFRCLCAAGFTGSHCELNINECQSNPCRNQATCVDELNSYSCKCQPGFSGXRCETEQSTGFNLDFEVSGIYGYVMLDGMLPSLHALTCTFWMKSSDDMNYGTPISYAVDNGSDNTLLLTDYNGWVLYVNGREKITNCPSVNDGR

SEQ ID NO: 594 - protein, 440 aa, Homo sapiens
APRAPGLVGRGDCDPLLSVCLTTMPLYEGLGSGGEKTAVVIDLGEAFTKCGFAGETGPRCIIPSVIKRAGMPKPVRVVQYNINTEELYSYLKEFIHILYFRHLLVNPRDRRVVIIESVLCPSHFRETLTRVLFKYFEVPSVLLAPSHLMALLTLGINSAMVLDCGYRESLVLPIYEGIPVLNCWGALPLGGKALHKELETQLLEQCTVDTSVAKEQSLPSVMGSVPEGVLEDIKARTCFVSDLKRGLKIQAAKFNIDGNNERPSPPPNVDYPLDGEKILHILGSIRDSVVEILFEQDNEEQSVATLILDSLIQCPIDTRKQLAENLVVIGGTSMLPGFLHRLLAEIRYLVEKPKYKKALGTKTFRIHTPPAKANCVAWLGGAIFGALQDILGSRSVSKEYYNQTGRIPDWCSLNNPPLEMMFDVGKTQPPLMKRAFSTEK

SEQ ID NO: 595 - protein, 150 aa, Homo sapiens
  SITE (101): Xaa equals any of the naturally occurring L-amino acids
  SITE (105): Xaa equals any of the naturally occurring L-amino acids
  SITE (108): Xaa equals any of the naturally occurring L-amino acids
  SITE (121): Xaa equals any of the naturally occurring L-amino acids
  SITE (127): Xaa equals any of the naturally occurring L-amino acids
  SITE (134): Xaa equals any of the naturally occurring L-amino acids
LGGPDSWKSLFGHWRKQRHWQRTALEIAKRGGTVHLVCRDQAPAEDARGEIIRESGNQNIFLHIVDLSDPKQIWKFVENFKQEHKLHVLINNAGCMVNKRXLTEXGLXKNFAANTLGVYIXTTGLIXVLEKEHXPRVITRLLRRNVGSET

SEQ ID NO: 596 - protein, 243 aa, Homo sapiens
  SITE (18): Xaa equals any of the naturally occurring L-amino acids
  SITE (35): Xaa equals any of the naturally occurring L-amino acids
CRDQAPAEDARGEIIREXGNQNIFLHIVDLSDPKXIWKFVENFKQEHKLHVLINNAGCMVNKRELTEDGLEKNFAANTLGVYILTTGLIPVLEKEHDPRVKGLGSCSSVQGLGMRSVSWSIQITVSSGGMLVQKLNTNDLQSERTPFDGTMVYAQNKRQQVVLTERWAQGHPAIHFSSMHPGWADTPGVRQAMPGFHARFGDRLRSEAQGADTMLWLALSSAAAAQPSGRFFQGDFLPGCEGS

SEQ ID NO: 597 - protein, 103 aa, Homo sapiens
GTSCGRHFTKSYNLLIHERTHTDERPYTCDICHKAFRRQDHLRDHRYIHSKEKPFKCQECGKGFCQSRTLAVHKTLHMQTSSPTAASSAAKCSGETVICGGTA

SEQ ID NO: 598 - protein, 142 aa, Homo sapiens
HESKLSPGLGSPISGLSKLTPDRKPSRGRLPSKTKKEFICKFCGRHFTKSYNLLIHERTHTDERPYTCDICHKAFRRQDHLRDHRYIHSKEKPFKCQECGKGFCQSRTLAVHKTLHMQTSSPTAASSAAKCSGETVICGGTA

SEQ ID NO: 599 - protein, 103 aa, Homo sapiens
  SITE (9): Xaa equals any of the naturally occurring L-amino acids
VSKKKAQIXRRQVPYLGFTIRQGSERSSGSEKKQVICNVPEPAPLPPWLLGAPLLVREAPHTRRGLESQPLCAPWLLGPPSQRGEAPPARQGRRACPSSPRGS

SEQ ID NO: 600 - protein, 371 aa, Homo sapiens
KLPWEPSFLIKMQIIRHSEQTLKTALISKNPVLVSQYEKLDAGEQRLMNEAFQPASDLFGPITLHSPSDWITSHPEAPQDFEQFFSDPYRKTPSPNKRSIYIQSIGSLGNTRIISEEYIKWLTGYCKAYFYGLRVKLLEPVPVSVTRCSFRVNENTHNLQIHAGDILKFLKKKKPEDAFCVVGITMIDLYPRDSWNFVFGQASLTDGVGIFSFARYGSDFYSMHYKGKVKKLKKTSSSDYSIFDNYYIPEITSVLLLRSCKTLTHEIGHIFGLRHCQWLACLMQGSNHLEEADRRPLNLCPICLHKLQCAVGFSIVERYKALVRWIDDESSDTPGATPEHSHEDNGNLPKPVEAFKEWKEWIIKCLAVLQK

SEQ ID NO: 601 - protein, 127 aa, Homo sapiens
HEGKNTVVAIAVWSHFSTFPLEVYIRRLRNIRRAVVRLLDRSPKTVVVIRTANAQELGPEVSLFNSDWYNFQLDTILRRMFSGVGVYLVDAWEMTLAHYLPHKLHPDEVIVKNQLDMFLSFVCPLET

SEQ ID NO: 602 - protein, 229 aa, Homo sapiens
HNDGLGNAFDGPGGALAHAFLPRRGEAHFDQDERWSLSRRRGRNLFVVLAHEIGHTLGLTHSPAPRALMAPYYKRLGRDALLSWDDVLAVQSLYGKPLGGSVAVQLPGKLFTDFETWDSYSPQGRRPETQGPKYCHSSFDAITVDRQQQLYIFKGSHFWEVAADGNVSEPRPLQERWVGLPPNIEAAAVSLNDGDFYFFKGCPLLRAGPRGTASGALLPPKSAGLGRHP

SEQ ID NO: 603 - protein, 144 aa, Homo sapiens
  SITE (82): Xaa equals any of the naturally occurring L-amino acids
  SITE (86): Xaa equals any of the naturally occurring L-amino acids
  SITE (87): Xaa equals any of the naturally occurring L-amino acids
  SITE (106): Xaa equals any of the naturally occurring L-amino acids
  SITE (111): Xaa equals any of the naturally occurring L-amino acids
  SITE (113): Xaa equals any of the naturally occurring L-amino acids
  SITE (114): Xaa equals any of the naturally occurring L-amino acids
  SITE (125): Xaa equals any of the naturally occurring L-amino acids
  SITE (142): Xaa equals any of the naturally occurring L-amino acids
GCILILHPSMANYSHAADNILQNLSPLTAFLKLTSLGFIIGVSVVGNLLISILLVKDKTLHRAPYYFLLDLCCSDILRSAIXFPFXXNSVKNGSTWTYGTLTCKVXAFLGXLXXFHTAFMLFCIXVTRYLISPITASIQRGXPL

SEQ ID NO: 604 - protein, 292 aa, Homo sapiens
LWTISNPVTLTCDATGIPPPTIAWLKNHKRIENSDSLEVRILSGGSKLQIARSQHSDSGNYTCIASNMEGKAQKYYFLSIQVPPSVAGAEIPSDVSVLLGENVELVCNANGIPTPLIQWLKDGKPIASGETERIRVSANGSTLNIYGALTSDTGKYTCVATNPAGEEDRIFNLNVYVTPTIRGNKDEAEKLMTLVDTSINIECRATGTPPPQINWLKNGLPLPLSSHIRLLAAGQVIRIVRAQVSDVAVYTCVASNRAGVDNKHYNLQVFAPRKKKKKKKKKKKKKKKKKKK

SEQ ID NO: 605 - protein, 749 aa, Homo sapiens
  SITE (25): Xaa equals any of the naturally occurring L-amino acids
  SITE (26): Xaa equals any of the naturally occurring L-amino acids
HYRRYACRYRSGIPGSTHASAHASXXASAHASGLALGMGQGLKAWPRYRVVGSADAGQYNLEITDAELSDDASYECQATEAALRSRRAKLTVLIPPEDTRIDGGPVILLQAGTPHNLTCRAFNAKPAATIIWFRDGTQQEGAVASTELLKDGKRETTVSQLLINPTDLDIGRVFTCRSMNEAIPSGKETSIELDVHHPPTVTLSIEPQTVQEGERVVFTCQATANPEILGYRWAKGGFLIEDAHESRYETNVDYSFFTEPVSCEVHNKVGSTNVSTLVNVHFAPRIVVDPKPTTTDIGSDVTLTCVWVGNPPLTLTWTKKDSNMGPRPPGSPPEAALSAQVLSNSNQLLLKSVTQADAGTYTCRAIVPRIGVAEREVPLYVNGPPIISSEAVQYAVRGDGGKVECFIGSTPPPDRIAWAWKENFLEVGTLERYTVERTNSGSGVLSTLTINNVMEADFQTHYNCTAWNSFGPGTAIIQLEEREVLPVGIIAGATIGASILLIFFFIALVFFLYRRRKGSRKDVTLRKLDIKVETVNREPLTMHSDREDDTASVSTATRVMKAIYSSFKDDVDLKQDLRCDTIDTREEYEMKDPTNGYYNVRAHEDRPSSRAVLYADYRAPGPARFDGRPSSRLSHSSGYAQLNTYSRGPASDYGPEPTPPGPAAPAGTDTTSQLSYENYEKFNSHPFPGAAGYPTYRLGYPQAPPSGLERTPYEAYDPIGKYATATRFSYTSQHSDYGQRFQQRMQTHV

SEQ ID NO: 606 - protein, 322 aa, Homo sapiens
  SITE (216): Xaa equals any of the naturally occurring L-amino acids
  SITE (221): Xaa equals any of the naturally occurring L-amino acids
HYRRYACRYRSGIPGSTHASAHASAHASVTAEHSGNYSCDADNGLGAQHSHGVSLRVTVPVSRPVLTLRAPGAQAVVGDLLELHCESLRGSFPILYWFYHEDDTLGNISAHSGGGASFNLSLTTEHSGNYSCEADNGLGAQHSKVVTLNVTGTSRNRTGLTAAGITGLVLSILVLAAAAALLHYARARRKPGGLSATGTSSHSPSECQEPSSSRPXRIDPXEPTHSKPLAPMELEPMYSNVNPGDSNPIYSQIWSIQHTKENSANCPMMHQEHEELTVLYSELKKTHPDDSAGEASSRGRAHEEDDEESYENVPRVLLASDH

SEQ ID NO: 607 - protein, 679 aa, Homo sapiens
GTSSSMLGEGQVLRSPTNRLLLHFQSPRVPRGGGFRIHYQAYLLSCGFPPRPAHGDVSVTDLHPGGTATFHCDSGYQLQGEETLICLNGTRPSWNGETPSCMASCGGTIHNATLGRIVSPEPGGAVGPNLTCRWVIEAAEGRRLHLHFERVSLDEDNDRLMVRSGGSPLSPVIYDSDMDDVPERGLISDAQSLYVELLSETPANPLLLSLRFEAFEEDRCFAPFLAHGNVTTTDPEYRPGALATFSCLPGYALEPPGPPNAIECVDPTEPHWNDTEPACKAMCGGELSEPAGVVLSPDWPQSYSPGQDCVWGVHVQEEKRILLQVEILNVREGDMLTLFDGDGPSARVLAQLRGPQPRRRLLSSGPDLTLQFQAPPGPPNPGLGQGFVLHFKEVPRNDTCPELPPPEWGWRTASHGDLIRGTVLTYQCEPGYELLGSDILTCQWDLSWSAAPPACQKIMTCADPGEIANGHRTASDAGFPVGSHVQYRCLPGYSLEGAAMLTCYSRDTGTPKWSDRVPKCALKYEPCLNPGVPENGYQTLYKHHYQAGESLRFFCYEGFELIGEVTITCVPGHPSQWTSQPPLCKVAYEELLDNRKLEVTQTTDPSRQLEGGNLALAILLPLGLVIVLGSGVYIYYTKLQGKSLFGFSGSHSYSPITVESDFSNPLYEAGDTREYEVSI

SEQ ID NO: 608 - protein, 229 aa, Homo sapiens
  SITE (2): Xaa equals any of the naturally occurring L-amino acids
  SITE (3): Xaa equals any of the naturally occurring L-amino acids
EXXKPKMTWRHHVRLLFTVSLALQIINLGNSYQREKHNGGRGEVTKVATQKHRQSPLNWTSSHFGEVTGSAEGWGPEEPLPYSRAFGEGASARPRCCRNGGTCVLGSFCVCPAHFTGRYCEHDQRRSECGALEHGAWTLRACHLCRCIFGALHCLPLQTPDRCDPKDFLASHAHGPSAGGAPSLLLLLPCALLHRLLRPDAPAHPRSLVPSVLQRERRPCGRPGLGHRL

SEQ ID NO: 609 - protein, 242 aa, Homo sapiens
  SITE (37): Xaa equals any of the naturally occurring L-amino acids
  SITE (68): Xaa equals any of the naturally occurring L-amino acids
  SITE (138): Xaa equals any of the naturally occurring L-amino acids
VLPAWEGGPGGGGRTSCLAWAVGWKWVFRRPPRLLRXLVGMAHLGPGSSGWGPPHFHRCPPEACCPWXEEAGQSGLALCSESSGLLAWKGGALLMVTVRQTQWSSRIWKWGLWVGQVLRECPHLGLWVLPSVGMKGLXSQSWGAAALVSAPAPGLRRVVGGAGLGRCLTWAGWPRPETAESSRRLGGFPHLGGGRPAAQPISLEHRVGRALGEGSHKKPGGRRPAATGVPSPQPPPRARGCR

SEQ ID NO: 610 - protein, 427 aa, Homo sapiens
RVDPRVRKDCSLDCAGSPQKPLCASDGRTFLSRCEFQRAKCKDPQLEIAYRGNCKDVSRCVAERKYTQEQARKEFQQVFIPECNDDGTYSQVQCHSYTGYCWCVTPNGRPISGTAVAHKTPRCPGSVNEKLPQREGTGKTVSLQIFSVLNSDDAAAPALETQPQGDEEDIASRYPTLWTEQVKSRQNKTNKNSVSSCDQEHQSALEEAKQPKNDNVVIPECAHGGLYKPVQCHPSTGYCWCVLVDTGRPIPGTSTRYEQPKCDNTARAHPAKARDLYKGRQLQGCPGAKKHEFLTSVLDALSTDMVHAASDPSSSSGRLSEPDPSHTLEERVVHWYFKLLDKNSSGDIGKKEIKPFKRFLRKKSKPKKCVKKFVEYCDVNNDKSISVQELMGCLGVAKEDGKADTKKRHTPRGHAESTSNRQPRKQG

SEQ ID NO: 611 - protein, 70 aa, Homo sapiens
VAAETADGKYAQKLFNDLFEDYSNALRPVEDTDKVLNVTLQITLSQIKDMDPIQNTTLYLAKIYFSGKNL

SEQ ID NO: 612 - protein, 135 aa, Homo sapiens
  SITE (28): Xaa equals any of the naturally occurring L-amino acids
  SITE (35): Xaa equals any of the naturally occurring L-amino acids
  SITE (48): Xaa equals any of the naturally occurring L-amino acids
  SITE (58): Xaa equals any of the naturally occurring L-amino acids
  SITE (104): Xaa equals any of the naturally occurring L-amino acids
  SITE (106): Xaa equals any of the naturally occurring L-amino acids
  SITE (115): Xaa equals any of the naturally occurring L-amino acids
  SITE (129): Xaa equals any of the naturally occurring L-amino acids
  SITE (134): Xaa equals any of the naturally occurring L-amino acids
KILIHDTTMENIMLRVHPDGNVLLSLRXTVSAMCXMDFSRFPLDTQNXSLELESYAYXEDDLMLYWKHGNKSLNTEEHMSLSQFFIEDFSASSGLAFYSSTGWXNXLFINFGLKXAWFLLWAANLFSQXLIGWXR

SEQ ID NO: 613 - protein, 204 aa, Homo sapiens
TRPPTRPVIEGNLISLLCESSGIPPPNLIWKKKGSPVLTDSMGRVRILSGGRQLQISIAEKSDAALYSCVASNVAGTAKKEYNLQVYIRPTITNSGSHPTEIIVTRGKSISLECEVQGIPPPTVTWMKDGVMHPRTTFLMVDEEQTVPFALRDENLKGVVYTTRPLREAETYRMRVRASSYSANGTIEYQTTFIVYIAVSAYPY

SEQ ID NO: 614 - protein, 59 aa, Homo sapiens
  SITE (5): Xaa equals any of the naturally occurring L-amino acids
  SITE (59): Xaa equals any of the naturally occurring L-amino acids
IGAAXIGLLGLVARSGHWCLSISAPVLTDSILPSQQLQKRIEVAIDGFKASPEVPKAPX

SEQ ID NO: 615 - protein, 327 aa, Homo sapiens
AREKNHLRKRKMGNRHAKASSPQGFDVDRDAKKLNKACKGMGTNEAAIIEILSGRTSDERQQIKQKYKATYGKELEEVLKSELSGNFEKTALALLDRPSEYAARQLQEAMKGLGTDESVLIEVLCTRTNKEIIAIKEAYQRLFDRSLESDVKGDTSGNLKKILVSLLQANRNEGDDVDKDLAGQDAKDLYDAGEGRWGTDELAFNEVLAKRSYKQLRATFQAYQILIGKDIEEAIEEETSGDLQKAYLTLVRCAQDCEDYFAERLYKSMKGAGTDEETLIRIIVTRAEVDLQGIKAKFQEKYQKSLSDMVRSDTSGDFRKLLVALLH

SEQ ID NO: 616 - protein, 90 aa, Homo sapiens
  SITE (20): Xaa equals any of the naturally occurring L-amino acids
KQWPRGRLEFQTDHSTGKRXFNITFTTFRHNECPDPGVPVNGKRFGDSLQLGSSISFLCDEGFLGTQGSETINCVLKEGSVVLEQRCAAV

SEQ ID NO: 617 - protein, 93 aa, Homo sapiens
DNGSKIQNFVLEWDEGKGNGEFCQCYMGSQKQFKITKLSPAMGCKFRLSARNDYGTSGFSEEVLYYTSGCAPSMPASPVLTKAGITWLSLQWE

SEQ ID NO: 618 - protein, 124 aa, Homo sapiens
FFFFSNVCFFSNTFSYKESTVINFSNYNIVTIFLSILWSIFQYSNFSIDPITSCMVYFPPFSIRSSLGSGTVSGSLFYASFNLEHFHSLSFSFMTLTFLRTTVPSPLFKVEHSLFCTCRMFPRD

SEQ ID NO: 619 - protein, 236 aa, Homo sapiens
DPRVRCSCGEISVHCLPWVLFILDYSLGLNDLNVSPPELTVHVGDSALMGCVFQSTEYKCIFKIDWTLSPGEHAKDEYVLYYYSNLSVPIGRFQNRVHLMGDNLCNDGSLLLQDVQEADQGTYICEIRLKGESQVFKKAVVLHVLPEEPKELMVHVGGLIQMGCVFQSTEVKHVTKVEWIFSGRRAKEEIVFRYYHKLRMSAEYSQSWGHFQNRVNLVGDIFRNDGSIMLQGVRES

SEQ ID NO: 620 - protein, 248 aa, Homo sapiens
AGRAPGRASGSEACPPKDCPLGQRQHLGPRSAGPSALLGRRRRRRPPPPPPPFPLPVFQARAAPFPPSFSPQGIPGHSEAGVLAGAGHDATVQLESCLLRDRGIGDHCVHLQGSIWSHDCQSCLPSGVLCPLIPHATGAGQPLLHMAAVGPAVLHSHVLDEETVHAGGRTLQMQPPLQIVLGCLLSIVEGGVTAQAGHSLPLRVVGLPYKPFHHELGGYAGAVENHTLQLYLPGLQNRQVPLGLAEPQ

SEQ ID NO: 621 - protein, 379 aa, Homo sapiens
MHIIEETQVFRESQSVENLVISLLQHSLYVGAPSGVIQLPLSSCSRYRSCYDCILARDPYCGWDPGTHACAAATTIANRSQGSRTALIQDIERGNRGCESSRDTGPPPPLKTRSVLRGDDVLLPCDQPSNLARALWLLNGSMGLSDGQGGYRVGVDGLLVTDAQPEHSGNYGCYAEENGLRTLLASYSLTVRPATPAPAPKAPATPGAQLAPDVRLLYVLAIAALGGLCLILASSLLYVACLREGRRGRRRKYSLGRASRAGGSAVQLQTVSGQCPGEEDEGDDEGAGGLEGSCLQIIPGEGAPAPPPPPPPPPPAELTNGLVALPSRLRRMNGNSYVLLRQSNNGVPAGPCSFAEELSRILEKRKHTQLVEQLDESSV

SEQ ID NO: 622 - protein, 101 aa, Homo sapiens
GRDDPGASPQSSSQPDHGRLSPPEAPDRPTISTASETSVYVTWIPRGNGGFPIQSFRVEYKKLKKVGDWILATSAIPPSRLSVEITGLRERHLLQVSSSGF

SEQ ID NO: 623 - protein, 194 aa, Homo sapiens
  SITE (127): Xaa equals any of the naturally occurring L-amino acids
  SITE (139): Xaa equals any of the naturally occurring L-amino acids
  SITE (157): Xaa equals any of the naturally occurring L-amino acids
  SITE (163): Xaa equals any of the naturally occurring L-amino acids
  SITE (182): Xaa equals any of the naturally occurring L-amino acids
GTLVITALNNHTVGRYQCVARMPAGAVASVPATVTLANLQDFKLDVQHVIEVDEGNTAVIACHLPESHPKAQVRYSVKQEWLEASRGNYLIMPSGNLQIVNASQEDEGMYKCAAYNPVTQEVKTSGXSDRLRVRRPPLXLPDHLPPRGPNHHRHQSXSLILGXCGQWNPTPTGHLGQRMGPXSPATTKTAFLLN

SEQ ID NO: 624 - protein, 261 aa, Homo sapiens
QPQHHGTSLTCQVTLPGAGVTTNRTIQLNVSYPPQNLTVTVFQGEGTASTALGNSSSLSVLEGQSLRLVCAVDSNPPARLSWTWRSLTLYPSQPSNPLVLELQVHLGDEGEFTCRAQNSLGSQHVSLNLSLQQEYTGKMRPVSGVLLGAVGGAGATALVFLSFCVIFIVVRSCRKKSARPAADVGDIGMKDANTIRGSASQGNLTESWADDNPRHHGLAAHSSGEEREIQYAPLSFHKGEPQDLSGQEATNNEYSEIKIPK

SEQ ID NO: 625 - protein, 109 aa, Homo sapiens
  SITE (23): Xaa equals any of the naturally occurring L-amino acids
  SITE (31): Xaa equals any of the naturally occurring L-amino acids
  SITE (77): Xaa equals any of the naturally occurring L-amino acids
  SITE (79): Xaa equals any of the naturally occurring L-amino acids
FAFFAVEMVVKMVALGIFGKKCXLGDTWNRXDFFIVIAGMLEYSLDLQNVSFSAVRTVRVLRPLRAINRVPSMRILXTXLLDTLPCWATSCCSASSSSSSSASSASSCG

SEQ ID NO: 626 - protein, 145 aa, Homo sapiens
  SITE (9): Xaa equals any of the naturally occurring L-amino acids
  SITE (85): Xaa equals any of the naturally occurring L-amino acids
VPMATAGAXPRGGQSEWGCGAPGASAAAWRCSRLAAVFTFTLPPSVPGGDSGELITAAHELGVAHPPGYPLFTLVAKLAITLFPXGSIAYRVNLLCGLFGAVAASLLFFTVFRLSGSSAGGILAAGVFSFSRLTWQWSIAAEVLA

SEQ ID NO: 627 - protein, 172 aa, Homo sapiens
CPAESSLSTGRGSVPGWPAHGPDLPAPRPALRGPAGVVVGGSVPRNESSPQPRGSESHCQAGPRGHRSRCEALAPRGSGPPPTSCEWRPPPDRWPRIPRCPGTNKRGQPWRPDPGPAAHSAWATPETQTPGVRVGAIRLPLSLGHCDSRSGPGLWTLRSKISCRIPAARGIH

SEQ ID NO: 628 - protein, 196 aa, Homo sapiens
  SITE (134): Xaa equals any of the naturally occurring L-amino acids
  SITE (153): Xaa equals any of the naturally occurring L-amino acids
  SITE (163): Xaa equals any of the naturally occurring L-amino acids
  SITE (185): Xaa equals any of the naturally occurring L-amino acids
  SITE (191): Xaa equals any of the naturally occurring L-amino acids
  SITE (195): Xaa equals any of the naturally occurring L-amino acids
TVCCLIEDSVGKPSLYCLTEQAKKMDRLKSHLTVCFLPSVPFLILVSTLATAKSVTNSTLNGTNVVLGSVPVIIARTDHIIVKEGNSALINCSVYGIPDPQFKWYNSIGKLLKEEEDEKERGGGKWQMHDSGLXNITKVSFSDRGKYTCVASXIYGTVNNTVXLRVIFTSGDMGCLLHWSCAWGXSHPSWXSISXR

SEQ ID NO: 629 - protein, 182 aa, Homo sapiens
TRPLTVSGPSTVMGAVGESLSVQCRYEEKYKTFNKYWCRQPCLPIWHEMVETGGSEGVVRSDQVIITDHPGDLTFTVTLENLTADDAGKYRCGIATILQEDGLSGFLPDPFFQVQVLVSSASSTENSVKTPASPTRPSQCQGSLPSSTCFLLLPLLKVPLLLSILGAILWVNRPWRTPWTES

SEQ ID NO: 630 - protein, 343 aa, Homo sapiens
SRADLPRPEVAPLRGLPRPKFSAPRGLRAPRSPRPEVSARTMRLGSPGLLFLLFSSLRADTQEKEVRAMVGSDVELSCACPEGSRFDLNDVYVYWQTSESKTVVTYHIPQNSSLENVDSRYRNRALMSPAGMLRGDFSLRLFNVTPQDEQKFHCLVLSQSLGFQEVLSIEVTLHVAANFSVPVVSAPHSPSQDELTFTCTSINGYPRPNVYWINKTDNSLLDQALQNDTVFLNMRGLYDVVSVLRIARTPSVNIGCCIENVLLQQNLTVGSQTGNDIGERDKITENPVSTGEKNAATWSILAVLCLLVVVAVAIGWVCRDRCLQHSYAGAWAVSPETELTGHV

SEQ ID NO: 631 - protein, 183 aa, Homo sapiens
PFKSTSDVTDKLTIDWTYRPPSSSHTVSIFHYQSFQYPTTAGTFRDRISWVGNVYKGDASISISNPTIKDNGTFSCAVKNPPDVHHNIPMTELTVTERGFGTMLSSVALLSILVFVPSAVVVALLLVRMGRKAAGLKKRSRSGYKKSSIEVSDDTDQEEEEACMARLCVRCAECLDSDYEETY

SEQ ID NO: 632 - protein, 208 aa, Homo sapiens
  SITE (189): Xaa equals any of the naturally occurring L-amino acids
  SITE (199): Xaa equals any of the naturally occurring L-amino acids
  SITE (201): Xaa equals any of the naturally occurring L-amino acids
QKPPSEKMPTYRKLTSLPLYQKSHNREKPYECGECGKAFRVRQQLTFHQRIHTGEKPYECKECGKAFRQCAHLSRHQRIHTSDKLYECKKCGKIFTCGSDLRVHQRIHIGEKPYECKECGKAFRVRGQLNLHQRIHTGEKPYECKECGKAFRQYAHLTRHQRLNIAEKCYECKECGQAFLCSTGLRLHXKLHTGEKKKXKXRGGARTQ

SEQ ID NO: 633 - protein, 285 aa, Homo sapiens
RGSELLSDDEVPLGIGGQFLKHQAEAQPEDLSLEEEARFSSQQPPAQLSHRPQRGPLLWPERGPPAPRHQEMASASPFLSAWSQVPVNLEDVAVYLSGEEPRCMDPAQRDAPLENEGPGIQLEDGGDGREDAPLRMEWYRVLSARCQGPGHPLPGQRPAPVRGLVRPDQPRGGPPPGRRASHGADKPYTCPECGKGFSKTSHLTKHQRTHTGERPYKCLVCGKGFSDRSNFSTHQRVHTGEKPYPCPECGKRFSQSSSLVIHRRTHSGERPYACTQCGKRFNNSS

SEQ ID NO: 634 - protein, 1139 aa, Homo sapiens
ARGVPVECPQPEKIPNGIIDVQGLAYLSTALYTCKPGFELVGNTTTLCGENGHWLGGKPTCKAIECLKPKEILNGKFSYTDLHYGQTVTYSCNRGFRLEGPSALTCLETGDWDVDAPSCNAIHCDSPQPIENGFVEGADYSYGAIIIYSCFPGFQVAGHAMQTCEESGWSSSIPTCMPIDCGLPPHIDFGDCTKLKDDQGYFEQEDDMMEVPYVTPHPPYHLGAVAKTWENTKESPATHSSNFLYGTMVSYTCNPGYELLGNPVLICQEDGTWNGSAPSCISIECDLPTAPENGFLRFTETSMGSAVQYSCKPGHILAGSDLRLCLENRKWSGASPRCEAISCKKPNPVMNGSIKGSNYTYLSTLYYECDPGYVLNGTERRTCQDDKNWDEDEPICIPVDCSSPPVSANGQVRGDEYTFQKEIEYTCNEGFLLEGARSRVCLANGSWSGATPDCVPVRCATPPQLANGVTEGLDYGFMKEVTFHCHEGYILHGAPKLTCQSDGNWDAEIPLCKPVNCGPPEDLAHGFPNGFSFIHGGHIQYQCFPGYKLHGNSSRRCLSNGSWSGSSPSCLPCRCSTPVIEYGTVNGTDFDCGKAARIQCFKGFKLLGLSEITCEADGQWSSGFPHCEHTSCGSLPMIPNAFISETSSWKENVITYSCRSGYVIQGSSDLICTEKGVWSQPYPVCEPLSCGSPPSVANAVATGEAHTYESEVKLRCLEGYTMDTDTDTFTCQKDGRWFPERISCSPKKCPLPENITHILVHGDDFSVNRQVSVSCAEGYTFEGVNISVCQLDGTWEPPFSDESCSPVSCGKPESPEHGFVVGSKYTFESTIIYQCEPGYELEGNRERVCQENRQWSGGVAICKETRCETPLEFLNGKADIENRTTGPNVVYSCNRGYSLEGPSEAHCTENGTWSHPVPLCKPNPCPVPFVIPENALLSEKEFYVDQNVSIKCREGFLLQGHGIITCNPDETWTQTSAKCEKISCGPPAHVENAIARGVHYQYGDMITYSCYSGYMLEGFLRSVCLENGTWTSPPICRAVCRFPCQNGGICQRPNACSCPEGWMGRLCEEPICILPCLNGGRCVAPYQCDCPPGWTGSRCHTAVCQSPCLNGGKCVRPNRCHCLSSWTGHNCSRKRRTGF

SEQ ID NO: 635 - protein, 179 aa, Homo sapiens
SCRGRCQCRERTFGARCDRYCQCFRGRCHPVDGTCACEPGYRGKYCREPCPAGFYGLGCRRRCGQCKGQQPCTVAEGRCLTCEPGWNGTKCDQPCATGFYGEGCSHRCPPCRDGHACNHVTGKCTRCNAGWIGDRCETKCSNGTYGEDCAFVCADCGSGHCDFQSGRCLCSPGVHGPHC

SEQ ID NO: 636 - protein, 122 aa, Homo sapiens
  SITE (14): Xaa equals any of the naturally occurring L-amino acids
  SITE (120): Xaa equals any of the naturally occurring L-amino acids
HEYEFKVRPSSGRXRGPDSNVLLLRLPEKVPSAPPQEVTLKPGNGTVFVSWVPPPAENHNGIIRGYQVWSLGNTSLPPANWTVVGEQTQLEIATHMPGSYCVQWLQSLVLELGSPVDLSXSF

SEQ ID NO: 637 - protein, 195 aa, Homo sapiens
  SITE (171): Xaa equals any of the naturally occurring L-amino acids
  SITE (179): Xaa equals any of the naturally occurring L-amino acids
  SITE (192): Xaa equals any of the naturally occurring L-amino acids
WSKPEGCSPEEVITYTLEIQEDENDNLFHPKYTGEDLTCTVKNLKRSTQYKFRLTASNTEGKSCPSEVLVCTTSPDRPGPPTRPLVKGPVTSHGFSVKWDPPKDNGGSEILKYLLEITDGNSEANQWEVAYSGSATEYTFTHLKPGTLYKLRACCISTGGHSQCSESLPVXTLSIAPGXCRPPRVWVDQSTXKST

SEQ ID NO: 638 - protein, 264 aa, Homo sapiens
GTRERDKEPLQERFFRPHFLQAPGDMVAHEGRLCRLDCKVSGLPPPELTWLLNGQPVLPDASHKMLVRETGVHSLLIDPLTQRDAGTYKCIATNKTGQNSFSLELSVVAKEVKKAPVILEKLQNCGVPEGHPVRLECRVIGMPPPVFYWKKDNETIPCTRERISMHQDTTGYACLLIQPAKKSDAGWYTLSAKNEAGIVSCTARLDIYAQWHHQIPPPMSVRPSGSRYGSLTSKGLDIFSAFSSMESTMVYSCSSRSVVESDEL

SEQ ID NO: 639 - protein, 194 aa, Homo sapiens
  SITE (17): Xaa equals any of the naturally occurring L-amino acids
KQAWLVLKIGILVNNVXMSYEYPEYFLDVPDLDNVIKKMININILSVCKMTQLVLPGMVERSKGAILNISSGSGMLPVPLLTIYSATKTFVDFFSQCLHEEYRSKGVFVQSVLPYFVATKLAKIRKPTLDKPSPETFVKSAIKTVGLQSRTNGYLIHALMGSIISNLPSWIYLKIVMNMNKSTRAHYLKKTKKN

SEQ ID NO: 640 - protein, 254 aa, Homo sapiens
EKPLNDTVTEYEVISRENGSFSGKNKSIQMTNQTFSTVENLKPNTSYEFQVKPKNPLGEGPVSNTVAFSTESADPRVSEPVSAGRDAIWTERPFNSDSYSECKGKQYVKRTWYKKFVGVQLCNSLRYKIYLSDSLTGKFYNIGDQRGHGEDHCQFVDSFLDGRTGQQLTSDQLPIKEGYFRAVRQEPVQFGEIGGHTKSIMFSGMNVGLQFLENGRCCTKLPSVSSLQTKIIENTMPHSFKAILFTMYKSLQSN

SEQ ID NO: 641 - protein, 752 aa, Homo sapiens
  SITE (625): Xaa equals any of the naturally occurring L-amino acids
ARVKEFLDSLASKGPEALQEFQQTATTTMVYQQGGNCIYTDSTEVAGSLLELACPVTTSVQPQTQQEQQIQVQQPQQVQVQVQVQQSPQQVSAQLSPQLTVHQPTEQPIQVQVQIQGQAPQSAAPSIQTPSLQSPSPSQLQAAQIQVQHVQAAQQIQAAEIPEEHIPHQQIQAQLVAGQSLAGGQQIQIQTVGALSPPPSQQGSPREGERRVGTASVLQPVKKRKVDMPITVSYAISGQPVATVLAIPQGQQQSYVSLRPDLLTVDSAHLYSATGTITSPTGETWTIPVYSAQPRGDPQQQSITHIAIPQEAYNAVHVSGSPTALAAVKLEDDKEKMVGTTSVVKNSHEEVVQTLANSLFPAQFMNGNIHIPVAVQAVAGTYQNTAQTVHIWDPQQQPQQQTPQEQTPPPQQQQQQLQVTCSAQTVQVAEVEPQSQPQPSPELLLPNSLKPEEGLEVWKNCAQTKNAELEKDAQNRLAPIGRRQLLRFQEDLISSAVAELNYGLCLMTREARNGEGEPYDPDVLYYIFLCIQKYLFENGRVDDIFSDLYYVRFTEWLHEVLKDVQPRVTPLGYVLPSHVTEEMLWECKQLGAHSPSTLVTTLMFFNTKDFLLKTVDQHMKLAFSXVLRQTKKNPSNPKDKSTSIRYLKALGIHQTGQKVTDDMYAEQTENPENPLRCPIKLYDFYLFKCPQSVKGRNDTFYLTPEPVVAPNSPIWYSVQPISREQMGQMLTRILVIREIQEAIAVANASTMH

SEQ ID NO: 642 - protein, 373 aa, Homo sapiens
PDVKTSGCSTAPRLEPQEPNSATSTTIAVYWSMNKEDVIDSFQVYCMEEPQDDQEVNELVEEYRLTVKESYCIFEDLEPDRCYQVWVMAVNFTGCSLPSERAIFRTAPSTPVIRAEDCTVCWNTATIRWRPTTPEATETYTLEYCRQHSPEGEGLRSFSGIKGLQLKVNLQPNDNYFFYVRAINAFGTSEQSEAALISTRGTRFLLLRETAHPALHISSSGTVISFGERRRLTEIPSVLGEELPSCGQHYWETTVTDCPAYRLGICSSSAVQAGALGQGETSWYMHCSEPQRYTFFYSGIVSDVHVTERPARVGILLDYNNQRLIFINAESEQLLFIIRHRFNEGVHPAFALEKPGKCTLHLGIEPPDSVRHK

SEQ ID NO: 643 - protein, 449 aa, Homo sapiens
GLSEPHTPRSSCHSRRLRGGSPAPRLSLGAASPRPRPPSLPLPLPLPFPLFLPTRPAERAWIRSRRASEWVGKMEVPRLDHALNSPTSPCEEVIKNLSLEAIQLCDRDGNKSQDSGIAEMEELPVPHNIKISNITCDSFKISWEMDSKSKDRITHYFIDLNKKENKNSNKFKHKDVPTKLVAKAVPLPMTVRGHWFLSPRTEYTVAVQTASKQVDGDYVVSEWSEIIEFCTADYSKVHLTQLLEKAEVIAGRMLKFSVFYRNQHKEYFDYVREHHGNAMQPSVKDNSGSHGSPISGKLEGIFFSCSTEFNTGKPPQDSPYGRYRFEIAAEKLFNPNTNLYFGDFYCMYTAYHYVILVIAPVGSPGDEFCKQRLPQLNSKDNKFLTCTEEDGVLVYHHAQDVILEVIYTDPVDLSLGTVAEITGHQLMSLSTANAKKDPSCKTCNISVGR

SEQ ID NO: 644 - protein, 106 aa, Homo sapiens
  SITE (58): Xaa equals any of the naturally occurring L-amino acids
DPRVRLTKKRVTLLILSIWAIAIFMGAVPTLGWNCLCDISACSSLAPIYSRSYLIFWXSVQPCGPFSSWLWCTWRIYMYVKRKTNVLCSTYEWVHQPPEDTHVSWM

SEQ ID NO: 645 - protein, 151 aa, Homo sapiens
  SITE (123): Xaa equals any of the naturally occurring L-amino acids
  SITE (133): Xaa equals any of the naturally occurring L-amino acids
  SITE (149): Xaa equals any of the naturally occurring L-amino acids
ITKKIFKSHLKSSRNSTSVKKKSSRNIFSIVFVFFVCFVPYHIARIPYTKSQTEAHYSCQSKEILRYMKEFTLLLSAANVCLDPIIYFFLCQPFREILCKKLHIPLKAQNDLDISRIKRGNTXLESTDTLVSXTLFQRKTTCACCHLQXHN

SEQ ID NO: 646 - protein, 728 aa, Homo sapiens
GRPTRPVKTIELEGGLLEDHFETTVKMSTYLVAYIVCDFHSLSGFTSSGVKVSIYASPDKRNQTHYALQASLKLLDFYEKYFDIYYPLSKLDLIAIPDFAPGAMENWGLITYRETSLLFDPKTSSASDKLWVTRVIAHELAHQWFGNLVTMEWWNDIWLKEGFAKYMELIAVNATYPELQFDDYFLNVCFEVITKDSLNSSRPISKPAETPTQIQEMFDEVSYNKGACILNMLKDFLGEEKFQKGIIQYLKKFSYRNAKNDDLWSSLSNSCLESDFTSGGVCHSDPKMTSNMLAFLGENAEVKEMMTTWTLQKGIPLLVVKQDGCSLRLQQERFLQGVFQEDPEWRALQERYLWHIPLTYSTSSSNVIHRHILKSKTDTLDLPEKTSWVKFNVDSNGYYIVHYEGHGWDQLITQLNQNHTLLRPKDRVGLIHDVFQLVGAGRLTLDKALDMTYYLQHETSSPALLEGLSYLESFYHMMDRRNISDISENLKRYLLQYFKPVIDRQSWSDKGSVWDRMLRSALLKLACDLNHAPCIQKAAELFSQWMESSGKLNIPTDVLKIVYSVGAQTTAGWNYLLEQYELSMSSAEQNKILYALSTSKHQEKLLKLIELGMEGKVIKTQNLAALLHAIARRPKGQQLAWDFVRENWTHLLKKFDLGSYDIRMIISGTTAHFSSKDKLQEVKLFFESLEAQGSHLDIFQTVLETITKNIKWLEKNLPTLRTWLMVNT

SEQ ID NO: 647 - protein, 300 aa, Homo sapiens
TRPLPPNVFSPARLPFFPAEGGPGRSRWREGGYLSQSRSGRLSQEEAAARSAGGMAGAPDERRRGPAAGEQLQQQHVSCQVFPERLAQGNPQQGFFSSFFTSNQKCQLRLLKTLETNPYVKLLLDAMKHSGCAVNKDRHFSCEDCNGNVSGGFDASTSQIVLCQNNIHNQAHMNRVVTHELIHAFDHCRAHVDWFTNIRHLACSEVRAANLSGDCSLVNEIFRLHFGLKQHHQTCVRDRATLSILAVRNISKEVAKKAVDEVFESCFNDHEPFGRIPHNKTYARYAHRDFENRDRYYSNI

SEQ ID NO: 648 - protein, 178 aa, Homo sapiens
  SITE (151): Xaa equals any of the naturally occurring L-amino acids
  SITE (166): Xaa equals any of the naturally occurring L-amino acids
NYERWHKQRRVIDLAFSRSSLVSLMETFNEKAEQLVEILEAKADGQTPVSMQDMLTYTAMDILAKAAFGMETSMLLGAQKPLSQAVKLMLEGITASRNTLAKFLPGKRKQLREVRESIRFLRQVGRDWVQRRREALKRGEEVPADILTQIXKAEEGAQDDEGLLDXFVTFFIAGHETS

SEQ ID NO: 649 - protein, 83 aa, Homo sapiens
  SITE (11): Xaa equals any of the naturally occurring L-amino acids
  SITE (49): Xaa equals any of the naturally occurring L-amino acids
VIEAAETPFTXGVEVDVFGKLGRSPPNVQFTFQQPKPLSVEPQQGPQAXGTTLTIHGTHLDTGSQEDVRVTLNGVPCKVTNLG

SEQ ID NO: 650 - protein, 719 aa, Homo sapiens
  SITE (23): Xaa equals any of the naturally occurring L-amino acids
  SITE (26): Xaa equals any of the naturally occurring L-amino acids
  SITE (350): Xaa equals any of the naturally occurring L-amino acids
  SITE (441): Xaa equals any of the naturally occurring L-amino acids
RILLWRLLFSFLLPFSHQSKKEXSDXLMTLFTSFNSLHSAMESFFQPLANSTNLADDGKRRTVVTPVILTKIDGVNVDTHHIPVNVTLRRIAHGADAVAARWDFDLLNGQGGWKSDGCHILYSDENITTIQCYSLSNYAVLMDLTGSELYTQAASLLHPVVYTTAIILLLCLLAVIVSYIYHHSLIRISLKSWHMLVNLCFHIFLTCVVFVGGITQTRNASICQAVGIILHYSTLATVLWVGVTARNIYKQVTKKAKRCQDPDEPPPPPRPMLRFYLIGGGIPIIVCGITAAANIKNYGSRPNAPYCWMAWEPSLGAFYGPASFITFVNCMYFLSIFIQLKRHPERKYEXKEPTEEQQRLAANENGEINHQDSMSLSLISTSALENEHTFHSQLLGASLTLLLYVALWMFGALAVSLYYPLDLVFSFVFGATSLSFSAFFXVHHCVNREDVRLAWIMTCCPGRSSYSVQVNVQPPNSNGTNGEAPKCPNSSAESSCTNKSASSFKNSSQGCKLTNLQAAAAQCHANSLPLNSTPQLDNSLTEHSMDNDIKMHVAPLEVQFRTNVHSSRHHKNRSKGHRASRLTVLREYAYDVPTSVEGSVQNGLPKSRLGNNEGHSRSRRAYLAYRERQYNPPQQDSSDACSTLPKSSRNFEKPVSTTSKKDALRKPAVVELENQQKSYGLNLAIQNGPIKSNGQEGPLLGTDSTGNVRTGLWKHETTV

SEQ ID NO: 651 - protein, 212 aa, Homo sapiens
HEPIPTRVCKVSDLHEGHFYEFRARAANWAGVGELSAPSSLFECKEWTMPQPGPPYDVRASEVRATSLVLQWEPPLYMGAGPVTGYHVSFQEEGSEQWKPVTPGPISGTHLRVSDLQPGKSYVFQVQAMNSAGLGQPSMPTDPVLLEDKPGAHEIEVGVDEEGFIYLAFEAPEAPDSSEFQWSKDYKGPLDPQRVKIEDKVNKSKVILKEPG

SEQ ID NO: 652 - protein, 213 aa, Homo sapiens
  SITE (1): Xaa equals any of the naturally occurring L-amino acids
  SITE (17): Xaa equals any of the naturally occurring L-amino acids
  SITE (179): Xaa equals any of the naturally occurring L-amino acids
  SITE (195): Xaa equals any of the naturally occurring L-amino acids
  SITE (205): Xaa equals any of the naturally occurring L-amino acids
XSTAVAAALELVDPPGXRNSARDKTMALKNINYLLIFYLSFSLLIYIKNSFCNKNNTRCLSNSCQNNSTCKDFSKDNDCSCSDTANNLDKDCDNMKDPCFSNPCQGSATCVNTPGERSFLCKCPPGYSGTICETTIGSCGKNSCQHGGICHQDPIYPVCICPAGYAGRFCEIDHDECAXKPLPKWGPCARMELMXTPASGPRISXQTLRLGSG

SEQ ID NO: 653 - protein, 130 aa, Homo sapiens
NIGIKHIPATQCGIWVRTSNGGHFASPNYPDSYPPNKECIYILEAAPRQRIELTFDEHYYIEPSFECRFDHLEVRDGPFGFSPLIDRYCGVKSPPLIRSTGRFMWIKFSSDEELEGLGFRAKYSFIPGKE

SEQ ID NO: 654 - protein, 269 aa, Homo sapiens
STHASGSPPLPTPALRWTKDFVPLGNGPTLSLSSLTFDSAGTYVCEASMPTVPLLSRTQSFKLLVQGPPQLSAEETQPQTEGGWREGDEVRLVCSARGYPEPKLSWSQLGGSPAEPALTGQGWVSSSLTLKGTSALSREGVSCEASNTHGKKQHVFHFGSVAPQTSQAGVAVMAVAVSVGLLLLAVAAFYCMRRKGRPGCCRRGEKGAPPPGDPQLSHSGSERPEQTGLLMGGASGGARHGSGGFGDEVGEDPGTLWVGGAPGDVGGPG

SEQ ID NO: 655 - protein, 481 aa, Homo sapiens
CELKYGGFVVRRTTELTVTAPLTDKPPKLLYPMESKLTIQETQLGDSANLTCRAFFGYSGDVSPLIYWMKGEKFIEDLDENRVWESDIRILKEHLGEQEVSISLIVDSVEEGDLGNYSCYVENGNGRRHASVLLHKRELMYTVELAGGLGAILLLLVCLVTIYKCYKIEIMLFYRNHFGAEELDGDNKDYDAYLSYTKVDPDQWNQETGEEERFALEILPDMLEKHYGYKLFIPDRDLIPTGTYIEDVARCVDQSKRLIIVMTPNYVVRRGWSIFELETRLRNMLVTGEIKVILIECSELRGIMNYQEVEALKHTIKLLTVIKWHGPKCNKLNSKFWKRLQYEMPFKRIEPITHEQALDVSEQGPFGELQTVSAISMAAATSTALATAHPDLRSTFHNTYHSQMRQKHYYRSYEYDVPPTGTLPLTSIGNQHTYCNIPMTLINGQRPQTKSSREQNPDEAHTNSAILPLLPRETSISSVIW

SEQ ID NO: 656 - protein, 168 aa, Homo sapiens
ESFPSKLLKSHPLKTKETWAFFEDLYVYAVLVCCMGILSILLFMLVIVWQSVFNKRKSRVRHYLVKCPQNSSGETVTSVTSLAPLQPKKGKRQKEKPDIPPAVPAKAPIAPTFHKPKLLKPQRKVTLPKIAEENLTYAELELIKPHRAAKGAPTSTVYAQILFEENKL

SEQ ID NO: 657 - protein, 553 aa, Homo sapiens
LEVLQLGRNSIRQIEVGAFNGLASLNTLELFDNWLTVIPSGAFEYLSKLRELWLRNNPIESIPSYAFNRVPSLMRLDLGELKKLEYISEGAFEGLFNLKYLNLGMCNIKDMPNLTPLVGLEELEMSGNHFPEIRPGSFHGLSSLKKLWVMNSQVSLIERNAFDGLASLVELNLAHNNLSSLPHDLFTPLRYLVELHLHHNPWNCDCDILWLAWWLREYIPTNSTCCGRCHAPMHMRGRYLVEVDQASFQCSAPFIMDAPRDLNISEGRMAELKCRTPPMSSVKWLLPNGTVLSHASRHPRISVLNDGTLIFSHVLLSDTGVYTCMVTNVAGNSNASAYLNVSTAELNTSNYSFFTTVTVETTEISPEDTTRKYKPVPTTSTGYQPAYTTSTTVLIQTTRVPKQVAVPATDTTDKMQTSLDEVMKTTKIIIGCFVAVTLLAAAMLIVFYKLRKRHQQRSTVTAARTVEIIQVDEDIPAATSAAATAAPSGVSGEGAVVLPTIHDHINYNTYKPAHGAHWTENSLGNSLHPTVTTISEPYIIQTHTKDKVQETQI

SEQ ID NO: 658 - protein, 269 aa, Homo sapiens
TRPHHYCHLYESLAVRLEVTDGPPATPAYWDGEKEVLAVARGAPALLTCVNRGHVWTDRHVEEAQQVVHWDRQPPGVPHDRADRLLDLYASGERRAYGPLFLRDRVAVGADAFERGDFSLRIEPLEVADEGTYSCHLHHHYCGLHERRVFHLTVAEPHAEPPPRGSPGNGSSHSGAPGPDPTLARGHNVINVIVPESRAHFFQQLGYVLATLLLFILLLVTVLLAARRRRGGYEYSDQKSGSQRGRMLTWRSSLWLQGTRCFTGVRTSS

SEQ ID NO: 659 - protein, 96 aa, Homo sapiens
  SITE (89): Xaa equals any of the naturally occurring L-amino acids
  SITE (92): Xaa equals any of the naturally occurring L-amino acids
VSAQRVLPFDDNICLREPCENYMRCVSVLRFDSSAPFIASSSVLFRPIHPVGGLRCRCPPGFTGDYCETEVDLCYSRPCGPHGQLPQPXGRXHLPL

SEQ ID NO: 660 - protein, 332 aa, Homo sapiens
ISDLLVGIFCMPITLLDNIIAGWPFGNTMCKISGLVQGISVAASVFTLVAIAVDRFQCVVYPFKPKLTIKTAFVIIMIIWVLAITIMSPSAVMLHVQEEKYYRVRLNSQNKTSPVYWCREDWPNQEMRKIYTTVLFANIYLAPLSLIVIMYGRIGISLFRAAVPHTGRKNQEQWHVVSRKKQKIIKMLLIVALLFILSWLPLWTLMMLSDYADLSPNELQIINIYIYPFAHWLAFGNSSVNPIIYGFFNENFRRGFQEAFQLQLCQKRAKPMEAYALKAKSHVLINTSNQLVQESTFQNPHGETLLYRKSAEKPQQELVMEELKETTNSSEI

SEQ ID NO: 661 - protein, 290 aa, Homo sapiens
WFGNLVTMEWWNDLWLNEGFAKFMEFVSVSVTHPELKVGDYFFGKCFDAMEVDALNSSHPVSTPVENPAQIREMFDDVSYDKGACILNMLREYLSADAFKSGIVQYLQKHSYKNTKNEDLWDSMASICPTDGVKGMDGFCSRSQHSSSSSHWHQEGVDVKTMMNTWTLQKGFPLITITVRGRNVHMKQEHYMKGSDGAPDTGYLWHVPLTFITSKSDMVHRFLLKTKTDVLILPEEVEWIKFNVGMNGYYIVHYEDDGWDSLTGLLKGTHTAVSSNDRASLINNAFQLVR

SEQ ID NO: 662 - protein, 323 aa, Homo sapiens
HETTSSRSFKHSRSAAVTSEFHLVPSRSMNGQPLTCVVSHPGLLQDQRITHILHVSFLAEASVRGLEDQNLWHIGREGAMLKCLSEGQPPPSYNWTRLDGPLPSGVRVDGDTLGFPPLTTEHSGIYVCHVSNEFSSRDSQVTVDVLDPQEDSGKQVDLVSASVVVVGVIAALLFCLLVVVVVLMSRYHRRKAQQMTQKYEEELTLTRENSIRRLHSHHTDPRSQPEESVGLRAEGHPDSLKDNSSCSVMSEEPEGRSYSTLTTVREIETQTELLSPGSGRAEEEEDQDEGIKQAMNHFVQENGTLRAKPTGNGIYINGRGHLV

SEQ ID NO: 663 - protein, 214 aa, Homo sapiens
  SITE (197): Xaa equals any of the naturally occurring L-amino acids
  SITE (204): Xaa equals any of the naturally occurring L-amino acids
  SITE (211): Xaa equals any of the naturally occurring L-amino acids
  SITE (212): Xaa equals any of the naturally occurring L-amino acids
PNTRIQRFEVLKNGTLVIRKVQVQDRGQYMCTASNLHGLDRMVVLLSVTVQQPQILASHYQDVTVYLGDTIAMECLAKGTPAPQISWIFPDRRVWQTVSPVEGRITLHENRTLSIKEASFSDRGVYKCVASNAAGADSLAIRLHVAALPPLSTRRSWRTSRCPRGSAFTFTALPRLRPCPACRWVLGDGTPDPPLAXSSPGNLXWFSPTGXXYI

SEQ ID NO: 664 - protein, 217 aa, Homo sapiens
DAREAGFQVKAYTFSEPFHLIVSYELFPAPILRAVPSAEPQAGSPMTLSCQTKLPLQRSAARLLFSFYKDGRIVQSRGLSSEFQIPTASEDHSGSYWCEAATEDNQVWKQSPQLEIRVQGASSSAAPPTLNPAPQKSAAPGTAPEEAPGPLPPPPTPSSEDPGFSSPLGMPDPHLYHQMGLLLKHMQDVRVLLGHLLMELRELSGHRKPGTTKATAE

SEQ ID NO: 665 - protein, 319 aa, Homo sapiens
TQPSLHLLPPNPRANSFVRRAAPGLVTAGHFSPDPGLPHLTQLPWVHGGADRAAEVPQEVTGVGESAQHAEAGRAVGVGHQPLVRALWCADRAPHLGKSHEEELVVGEPHGWQLLLLPMLSQPCFVSIVGSLQPPVVSNVLPQRLAAVEPLPIDLVLIVLFLHAGRVVPEGCQGLILPPGPQVPFFVILAPLVIKGMRQLMAHDHTDATEVQGLGVVAGIEGGLQDASGEDDLILSWKVVGIHCLGGHAPLVSAGRLAELVSHNLGREVVQIQHVLEERIFRNFVPVINIIQLFGLQDKVWETNHIIDGICFLLGCLAG

SEQ ID NO: 666 - protein, 156 aa, Homo sapiens
AFLVCTLSEWGCLYVCVSYVSSKCLGCVCFPTAQARPVWLEVTPRTPGGCGSQQRGQQQQRWGAVRGRALARVGAAAASLLAPQLLAEDARVCGRAQAAHVVVARPSVLAVQELVVADIRTNTGNTGDTGICSAFGDGEIGAWTPRSALIILLAFP

SEQ ID NO: 667 - protein, 426 aa, Homo sapiens
PRVRPLLLLSLHGVAASLEVSESPGSIQVARGQTAVLPCTFTTSAALINLNVIWMVTPLSNANQPEQVILYQGGQMFDGAPRFHGRVGFTGTMPATNVSIFINNTQLSDTGTYQCLVNNLPDIGGRNIGVTGLTVLVPPSAPHCQIQGSQDIGSDVILLCSSEEGIPRPTYLWEKLDNTLKLPPTATQDQVQGTVTIRNISALSSGLYQCVASNAIGTSTCLLDLQVISPQPRNIGLIAGAIGTGAVIIIFCIALILGAFFYWRSKNKEEEEEEIPNEIREDDLPPKCSSAKAFHTEISSSDNNTLTSSNAYNSRYWSNNPKVHRNTDSVSHFSDLGQSFSFHSGNANIPSIYANGTHLVPGQHKTLVVTANRGSSPQVMSRSNGSVSRKPRPPHTHSYTISHATLERIGAVPVMVPAQSRAGSLV

SEQ ID NO: 668 - protein, 328 aa, Homo sapiens
NNSGVMPEMPEDMEQEEVNIPNRRVLVTGATGLLGRAVHKEFQQNNWHAVGCGFRRARPKFEQVNLLDSNAVHHIIHDFQPHVIVHCAAERRPDVVENQPDAASQLNVDASGNLAKEAAAVGAFLIYISSDYVFDGTNPPYREEDIPAPLNLYGKTKLDGEKAVLENNLGAAVLRIPILYGEVEKLEESAVTVMFDKVQFSNKSANMDHWQQRFPTHVKDVATVCRQLAEKRMLDPSIKGTFHWSGNEQMTKYEMACAIADAFNLPSSHLRPITDSPVLGAQRPRNAQLDCSKLETLGIGQRTPFRIGIKESLWPFLIDKRWRQTVFH

SEQ ID NO: 669 - protein, 261 aa, Homo sapiens
PPIMPGWLTLPTLCRFLLWAFTIFHKAQGDPASHPGPHYLLPPIHEVIHSHRGATATLPCVLGTTPPSYKVRWSKVEPGELRETLILITNGLHARGYGPLGGRARMRRGHRLDASLVIAGVRLEDEGRYRCELINGIEDESVALTLSLEGVVFPYQPSRGRYQFNYYEAKQACEEQDGRLATYSQLYQAWTEGLDWCNAGWLLEGSVRYPVLTARAPCGGRGRPGIRSYGPRDRMRDRYDAFCFTSALAAKCSSCPAADAV

SEQ ID NO: 670 - protein, 314 aa, Homo sapiens
LRQALIRLTIGKAGTPAGTGPEFPGRPTRPARQVGLRRCLQAASGPEAPARARVHLQSQDTAAATMATPGLQQHQQPPGPGRHRWPPPPGGAAPAPVRGMTDSPPPAVGCVLSGLTGTLSPSRSCSVCTSPSSPPATGTGPAAPTAICQPPCRNGGSCVQPGRCRCPAGWRGDTCQSDVDECSARRGGCPQRCVNTAGSYWCQCWEGHSLSADGTLCVPKGGPPRVAPNPTGVDSAMKEEVQRLQSRVDLLEEKLQLVLAPLHSLASQALEHGLPDPGSLLVHSFQQLGRIDSLSEQISFLEEQLGSCSCKKDS

SEQ ID NO: 671 - protein, 331 aa, Homo sapiens
ALRHSRELPGLAGVGYPYHRNAGTIASSRPLLSAEPLWSCDSENQNFLCLLLAALTFLLCKAIQNTSTSLHLQLSLCLFLAHLLFLVGIDRTEPKVLCSIIAGALHYLYLAAFTWMLLEGVHLFLTARNLTVVNYSSINRLMKWIMFPVGYGVPAVTVAISAASWPHLYGTADRCWLHLDQGFMWSFLGPVCAIFSANLVLFILVFWILKRKLSSLNSEVSTIQNTRMLAFKATAQLFILGCTWCLGLLQVGPAAQVMAYLFTIINSLQGFFIFLVYCLLSQQVQKQYQKWFREIVKSKSESETYTLSSKMGPDSKPSEGDVFPGQVKRKY

SEQ ID NO: 672 - protein, 103 aa, Homo sapiens
  SITE (16): Xaa equals any of the naturally occurring L-amino acids
  SITE (24): Xaa equals any of the naturally occurring L-amino acids
  SITE (32): Xaa equals any of the naturally occurring L-amino acids
  SITE (57): Xaa equals any of the naturally occurring L-amino acids
  SITE (103): Xaa equals any of the naturally occurring L-amino acids
SMQMARLLGLCAWARXSVRMASSXMTRRDPLXNKVALVTASTDGIGFAIARRLAQDXAHVVVSSRKQQNVDQAVATLQGEGLSVTGTCAMWGRRRTGSGWWPX

SEQ ID NO: 673 - protein, 193 aa, Homo sapiens
  SITE (6): Xaa equals any of the naturally occurring L-amino acids
  SITE (103): Xaa equals any of the naturally occurring L-amino acids
  SITE (127): Xaa equals any of the naturally occurring L-amino acids
SMHKAXLLGLCARAWNSVRMASSGMTRRDPLANKVALVTASTDGIGFAIARRLAQDGAHVVVSSRKQQNVDQAVATLQGEGLSVTGTVCHVGKAEDRERLVAXAVKLHGGIDILVSNAAVNPFFGSXMDVTEEVWDKLWMDKEKEESMKETLRIRRLGEPEDCAGIVSFLCSEDASYITGETVVVGGGTPSRL

SEQ ID NO: 674 - protein, 148 aa, Homo sapiens
AHSARDGVNCDKANCSTTCFNGGTCFYPGKCICPPGLEGEQCEISKCPQPCRNGGKCIGKSKCKCSKGYQGDLCSKPVCEPGCGAHGTCHEPNKCQCQEGWHGRHCNKRYEASLIHALRPAGAQLRQYTPSLKKAEERRDPPESNYIW

SEQ ID NO: 675 - protein, 273 aa, Homo sapiens
  SITE (20): Xaa equals any of the naturally occurring L-amino acids
NCTPDRYRSGIPGSTHASGXAPPGPAPRRGSGGESPDSPDAARRAMGFPAAALLCALCCGLLAPAARAGYSEERCSWRGSGLTQEPGSVGQLALACAEGAVEWLYPAGALRLTLGGPDPRARPGIACLRPVRPFAGAQVFAERAGGALELLLAEGPGPAGGRCVRWGPRERRALFLQATPHQDISRRVAAFRFELREDGRPELPPQAHGLGVDGACRPCSDAELLLAACTSDFVIHGIIHGVTHDVELQESVITVVGATALEVMGLSIRTLFT

SEQ ID NO: 676 - protein, 105 aa, Homo sapiens
  SITE (90): Xaa equals any of the naturally occurring L-amino acids
  SITE (105): Xaa equals any of the naturally occurring L-amino acids
HQRWQISTVLPHLFSFLSVLGLWGLINNAGVPGVLAPTDWLTLEDYREPIEVNLFGLISVTLNMLPLVKKAQGRVINVSSVGGRLAIVGXGYTPSNMQWEGFMTX

SEQ ID NO: 677 - protein, 92 aa, Homo sapiens
  SITE (83): Xaa equals any of the naturally occurring L-amino acids
GKLKIEDITDKYIFITGCDSGFGNLAARTFDKKGFHVIAACLTESGSTALKAETSERLRTVLLDVTDPENVKRTAQWVKNQVXGESLWGSDQ

SEQ ID NO: 678 - protein, 368 aa, Homo sapiens
HELLFNNRLVHLDEHAFHGLRALSHLYLGCNELASFSFDHLHGLSATHLLTLDLSSNRLGHISVPELAALPAFLKNGLYLHNNPLPCDCRLYHLLQRWHQRGLSAVRDFAREYVCLAFKVPASRVRFFQHSRVFENCSSAPALGLERPEEHLYALVGRSLRLYCNTSVPAMRIAWVSPQQELLRAPGSRDGSIAVLADGSLAIGNVQEQHAGLFVCLATGPRLHHNQTHEYNVSVHFPRPEPEAFNTGFTTLLGCAVGLVLVLLYLFAPPCRCCRRACRCRRWPQTPSPLQELSAQSSVLSTTPPDAPSRKASVHKHVVFLEPGRRGLNGRVQLAVAEEFDLYNPGGLQLKAGSESASSIGSEGPMTT

SEQ ID NO: 679 - protein, 661 aa, Homo sapiens
LAWDTRTTEMQGPLLLPGLCFLLSLFGAVTQKTKTSCAKCPPNASCVNNTHCTCNHGYTSGSGQKLFTFPLETCNDINECTPPYSVYCGFNAVCYNVEGSFYCQCVPGYRLHSGNEQFSNSNENTCQDTTSSKTTQGRKELQKIVDKFESLLTNQTLWRTEGRQEISSTATTILRDVESKVLETALKDPEQKVLKIQNDSVAIETQAITDNCSEERKTFNLNVQMNSMDIRCSDIIQGDTQGPSAIAFISYSSLGNIINATFFEEMDKKDQVYLNSQVVSAAIGPKRNVSLSKSVTLTFQHVKMTPSTKKVFCVYWKSTGQGSQWSRDGCFLIHVNKSHTMCNCSHLSSFAVLMALTSQEEDPVLTVITYVGLSVSLLCLLLAALTFLLCKAIQNTSTSLHLQLSLCLFLAHLLFLVGIDRTEPKVLCSIIAGALHYLYLAAFTWMLLEGVHLFLTARNLTVVNYSSINRLMKWIMFPVGYGVPAVTVAISAASWPHLYGTADRCWLHLDQGFMWSFLGPVCAIFSANLVLFILVFWILKRKLSSLNSEVSTIQNTRMLAFKATAQLFILGCTWCLGLLQVGPAAQVMAYLFTIINSLQGFFIFLVYCLLSQQVQKQYQKWFREIVKSKSESETYTLSSKMGPDSKPSEGDVFPGQVKRKY

SEQ ID NO: 680 - protein, 487 aa, Homo sapiens
  SITE (6): Xaa equals any of the naturally occurring L-amino acids
WIPRAXGIRHEGNWGCYTEQQRCDGYWHCPNGRDETNCTMCQKEEFPCSRNGVCYPRSDRCNYQNHCPNGSDEKNCFFCQPGNFHCKNNRCVFESWVCDSQDDCGDGSDEENCPVIVPTRVITAAVIGSLICGLLLVIALGCTCKLYSLRMFERRSFETQLSRVEAELLRREAPPSYGQLIAQGLIPPVEDFPVCSPNQASVLENLRLAVRSQLGFTSVRLPMAGRSSNIWNRIFNFARSRHSGSLALVSADGDEVVPSQSTSREPERNHTHRSLFSVESDDTDTENERRDMAGASGGVAAPLPQKVPPTTAVEATVGACASSSTQSTRGGHADNGRDVTSVEPPSVSPARHQLTSALSRMTQGLRWVRFTLGRSSSLSQNQSPLRQLDNGVSGREDDDDVEMLIPISDGSSDFDVNDCSRPLLDLASDQGQGLRQPYNATNPGVRPSNRDGPCERCGIVHTAQIPDTCLEVTLKNETSDDEALLLC

SEQ ID NO: 681 - protein, 195 aa, Homo sapiens
  SITE (4): Xaa equals any of the naturally occurring L-amino acids
  SITE (39): Xaa equals any of the naturally occurring L-amino acids
  SITE (134): Xaa equals any of the naturally occurring L-amino acids
  SITE (158): Xaa equals any of the naturally occurring L-amino acids
  SITE (171): Xaa equals any of the naturally occurring L-amino acids
  SITE (176): Xaa equals any of the naturally occurring L-amino acids
  SITE (183): Xaa equals any of the naturally occurring L-amino acids
  SITE (192): Xaa equals any of the naturally occurring L-amino acids
  SITE (193): Xaa equals any of the naturally occurring L-amino acids
APPXPSSQAPPCRPRPSCRPRPGMASLRWCAQPTPPGCXCGTGAASVCHPADIDECMLFGSEICKEGKCVNTQPGYECYCKQGFYYDGNLLECVDVDECLDESNCRNGVCENTRGGYRCACTPPAEYSPAQRQXPEPRKEMDVDEWQGPGKPCRPCPXASNLAGAPTRLRXVGPPXGCPGPLXGRELASFPXXPR

SEQ ID NO: 682 - protein, 88 aa, Homo sapiens
CFLPYHTLRTVHLTTWKVGLCKDRLHKALVITLALAAANACFNPLLYYFAGENFKDRLKSALRKGHPQKAKTKCVFPVSVWLRKETRV

SEQ ID NO: 683 - protein, 208 aa, Homo sapiens
PRVRFDGSTSVAQCKNRQCGGELGEFTGYIESPNYPGNYPAGVECIWNINPPPKRKILIVVPEIFLPSEDECGDVLVMRKNSSPSSITTYETCQTYERPIAFTARSRKLWINFKTSEANSARGFQIPYVTYDEDYEQLVEDIVRDGRLYASENHQEILKDKKLIKAFFEVLAHPQNYFKYTEKHKEMLPKSFIKLLRSKVSSFLRPYK

SEQ ID NO: 684 - protein, 220 aa, Homo sapiens
  SITE (20): Xaa equals any of the naturally occurring L-amino acids
  SITE (25): Xaa equals any of the naturally occurring L-amino acids
EFLSFADDLLSGLGTSCVAXGRSHXEVPEVSIYSVIFKCLEPDGLYKFTLYAVDTRGRHSELSTVTLRTACPLVDDNKAEEIADKIYNLYNGYTSGKEQQMAYNTLMEVSASMLFRVQHHYNSHYEKFGDFVWRSEDELGPRKAHLILRRLERVSSHCSSLLRSAYIQSRVETVPYLFCRSEEVRPAGMVWYSILKDTKITCEEKMVSMARNTYGESKGR

SEQ ID NO: 685 - protein, 377 aa, Homo sapiens
  SITE (141): Xaa equals any of the naturally occurring L-amino acids
DWNPQNMPGNATPVTTTAPWASLGLSAKTCNNVSFEESRIVLVVVYSAVCTLGVPANCLTAWLALLQVLQGNVLAVYLLCLALCELLYTGTLPLWVIYIRNQHRWTLGLLACKVTAYIFFCNIYVSILFLCCISCDRFVAXVYALESRGRRRRRTAILISACIFILVGIVHYPVFQTEDKETCFDMLQMDSRIAGYYYARFTVGFAIPLSIIAFTNHRIFRSIKQSMGLSAAQKAKVKHSAIAVVVIFLVCFAPYHLVLLVKAAAFSYYRGDRNAMCGLEERLYTASVVFLCLSTVNGVADPIIYVLATDHSRQEVSRIHKGWKEWSMKTDVTRLTHSRDTEELQSPVALADHYTFSRPVHPPGSPCPAKRLIEESC

SEQ ID NO: 686 - protein, 251 aa, Homo sapiens
ARADIHFLEPLESGRPTRLSCSLPGSCEAGPPLTFSWTGNALSPLDPETTRSSELTLTPRPEDHGTNLTCQVKRQGAQVTTERTVQLNVSYAPQNLAISIFFRNGTGTALRILSNGMSVPIQEGQSLFLACTVDSNPPASLSWFREGKALNPSQTSMSGTLELPNIGAREGGEFTCRVQHPLGSQHLSFILSVQRSSSSCICVTEKQQGSWPLVLTLIRGALMGAGFLLTYGLTWIYYTSGVQAILLPQPP

SEQ ID NO: 687 - protein, 65 aa, Homo sapiens
KYINYVAKVSVKSMENKSCIILFEIRLLYSYIFIICYLFKKVKCYGLPSSNELKTFFPTVYKSST

SEQ ID NO: 688 - protein, 40 aa, Homo sapiens
RSHPQDPVISYQVHLHLILGITIHHEGWWRHGSKPCHILS

SEQ ID NO: 689 - protein, 68 aa, Homo sapiens
  SITE (19): Xaa equals any of the naturally occurring L-amino acids
STHASVTIWVIMRNKRALXVRATGFKFQFYYLLTVLLWYVNQLQYHQENGSDSTHIVVMHENCLARNA

SEQ ID NO: 690 - protein, 43 aa, Homo sapiens
  SITE (36): Xaa equals any of the naturally occurring L-amino acids
  SITE (42): Xaa equals any of the naturally occurring L-amino acids
VCAPKSLQTCWAGWTVSQLIGMAELGHIQGLGQQGXGMGKGXH

SEQ ID NO: 691 - protein, 114 aa, Homo sapiens
  SITE (32): Xaa equals any of the naturally occurring L-amino acids
  SITE (88): Xaa equals any of the naturally occurring L-amino acids
  SITE (106): Xaa equals any of the naturally occurring L-amino acids
  SITE (107): Xaa equals any of the naturally occurring L-amino acids
FFILLFSKLLKVMQIKGFDLHSLGHEWQDEFXHIMAMTDPAFGSSGRPLLVLSCISQGDVKRMPCFYLAHELHLNLLNHPWLVQDTEXETLTGFLMALSGFLRSGXXRASGSLF

SEQ ID NO: 692 - protein, 67 aa, Homo sapiens
  SITE (19): Xaa equals any of the naturally occurring L-amino acids
  SITE (36): Xaa equals any of the naturally occurring L-amino acids
VDLTYRVRIVKELHSYSKXSAKCQIAAYYSSRAPHXYVLFPSQESSSLTLYCSQDMFGLGPGEGHRK

SEQ ID NO: 693 - protein, 52 aa, Homo sapiens
  SITE (37): Xaa equals any of the naturally occurring L-amino acids
  SITE (49): Xaa equals any of the naturally occurring L-amino acids
IKMPFLEGKMHKHLLFSTLEELGHAFHHCWDWEKVQXPGGTADLQVEPXGGN

SEQ ID NO: 694 - protein, 52 aa, Homo sapiens
  SITE (40): Xaa equals any of the naturally occurring L-amino acids
  SITE (50): Xaa equals any of the naturally occurring L-amino acids
IIIRNDYNTAYHSLKASVCGRICPGHFIYTHNLFGFLGRXTTWLHTWSFXYS

SEQ ID NO: 695 - protein, 63 aa, Homo sapiens
  SITE (4): Xaa equals any of the naturally occurring L-amino acids
LTMXNRPHDPITSHQAPSPTLGITVHHEIWAGNTNLNHITIQVFNLHKCQGFKRLPGSPKLLH

SEQ ID NO: 696 - protein, 62 aa, Homo sapiens
  SITE (29): Xaa equals any of the naturally occurring L-amino acids
SSHGNNRSCIIHGHKLTHGWGRSSHLRPXGQARYCREAARGGARYPIRPIVSRITIHWASFY

SEQ ID NO: 697 - protein, 106 aa, Homo sapiens
AEVAVSQDRATALYLARTTLCLQKKVSEGKRYTKGYTYTASSMMFHLTYTISIFRKQYETNFTLNVANVCNSPVFSLHVRIRRIDFRLTDGCSNKKMNCLGEFELF

SEQ ID NO: 698 - protein, 99 aa, Homo sapiens
  SITE (4): Xaa equals any of the naturally occurring L-amino acids
  SITE (71): Xaa equals any of the naturally occurring L-amino acids
  SITE (72): Xaa equals any of the naturally occurring L-amino acids
PAVXLRNMAVAKHNLNIMIKRYNSTAATNEVPEVTVFSKSPVTLGQPNTLICLVDNIFPPVVNITWLSNGXXVTEGVSETSFLSKSDHPSSRSVTSPSS

SEQ ID NO: 699 - protein, 97 aa, Homo sapiens
VEPPDKGKRARGAGSAPFIFFRSVGGEDTTLNRCSCSFRVLVVSAKFEGKPLLQRHRLVNACLAEELPHIHAFEQKTLTPDQWALSDRNEGWDLHSH

SEQ ID NO: 700 - protein, 64 aa, Homo sapiens
KVLKKIQVIIIQHFIVIQNKIYDGIFACKCLNEVVLNKKLLIDLRKTQFTCEFNELDHSLGFLC

SEQ ID NO: 701 - protein, 60 aa, Homo sapiens
NFIFQIIVYYFKGIFQYDMGHFVHLSQSKNVKSLQRIVSQNLYFMSIVFILIIAHNAFSK

SEQ ID NO: 702 - protein, 87 aa, Homo sapiens
  SITE (60): Xaa equals any of the naturally occurring L-amino acids
  SITE (77): Xaa equals any of the naturally occurring L-amino acids
PSGPPGPCAPATAAATPAPAPTPLQLHDRDVHHQLLHVWRGLPEPAVHDEDRGTLLRCPXPRLRPTCTPALPPPCLXAQPAPATCAS

SEQ ID NO: 703 - protein, 31 aa, Homo sapiens
LDIVFKGTKVFVAACQLGHQLHFRDRIFVYT

SEQ ID NO: 704 - protein, 54 aa, Homo sapiens
NVCTVNKGKNIIFLIIFRKNITLCIKEHDKQSKKKNNKLGKHISIAHHGQCYLF

SEQ ID NO: 705 - protein, 72 aa, Homo sapiens
  SITE (3): Xaa equals any of the naturally occurring L-amino acids
  SITE (9): Xaa equals any of the naturally occurring L-amino acids
  SITE (14): Xaa equals any of the naturally occurring L-amino acids
  SITE (42): Xaa equals any of the naturally occurring L-amino acids
NGXKGKPNXIPAWXTNPYPRTKMGGGAPTLWCVIGNMGKMPXPVFWKRRNSARPYLFPIFRNFSSKKFQLYL

SEQ ID NO: 706 - protein, 57 aa, Homo sapiens; identical to SEQ ID NO: 450

SEQ ID NO: 707 - protein, 122 aa, Homo sapiens; identical to SEQ ID NO: 453
  SITE (72): Xaa equals any of the naturally occurring L-amino acids

SEQ ID NO: 708 - protein, 33 aa, Homo sapiens
RTLGRWIIYKHQLGHNGKVLFFPGLAIFDASGF

SEQ ID NO: 709 - protein, 38 aa, Homo sapiens
SNYWCLLFKSGSVVIAQEYSHEKTYFPCLCGAYGRVVK

SEQ ID NO: 710 - protein, 54 aa, Homo sapiens
VGKTLIITHPILHQLYLIRFKMLLIVRWISISVMLKYKKWLKYGKYRFSVSQDL

SEQ ID NO: 711 - protein, 97 aa, Homo sapiens
RFCRYGPESRVDHASAHASAHASAHASAANKPLVSHFRYFSSFLQREGWLSYLPKPLPGLNSTSTIYCSVLSLFHVTIAWSIREKPRLLVDSQLKYH

SEQ ID NO: 712 - protein, 74 aa, Homo sapiens
  SITE (37): Xaa equals any of the naturally occurring L-amino acids
LWDTQSDGAGWSEDIEPWCVWNFHRGKPGAREARKRXRRTEGLYRCHCAEGGYEGGRCMGEGECSVAGGLGKGE

SEQ ID NO: 713 - protein, 82 aa, Homo sapiens
  SITE (82): Xaa equals any of the naturally occurring L-amino acids
NSAQVGWTGTQGEAGGETGDLGKRGNGWKGPDTWVPEGMQGRWSLGNRMLGSWAGSCLKGQYSTVQISSLGTWEEGVLRCEX

SEQ ID NO: 714 - protein, 248 aa, Homo sapiens
  SITE (189): Xaa equals any of the naturally occurring L-amino acids
ISAMANEAYPCPCDIGHRLEYGGLGREVQVEHIKAYVTKSPVDAGKAVIVIQDIFGWQLPNTRYIADMISGNGYTTIVPDFFVGQEPWDPSGDWSIFPEWLKTRNAQKIDREISAILKYLKQQCHAQKIGIVGFCWGGTAVHHLMMKYSEFRAGVSVYGIVKDSEDIYNLKNPTLFIFAENDVVIPLKXVSLLTQKLKEHCKVEYQIKTFSGQTHGFVHRKREDCSPADKPYIDEARRNLIEWLNKYM

SEQ ID NO: 715 - protein, 59 aa, Homo sapiens
CLYTDMIHNIHLLHPQCPPLCLDKSMQGRTFLSLAFFPGSFLFVCLFFKRQGLLLSHSG

SEQ ID NO: 716 - protein, 94 aa, Homo sapiens
  SITE (71): Xaa equals any of the naturally occurring L-amino acids
HEVTHIQARFHLQQSWMRWLAEANPLPALQAKAGMWPRWFLRSLTILRSCILSISGQRCLHAPSSFVSLMXLATCYSSLSYFSRFHRERFSCPW

SEQ ID NO: 717 - protein, 166 aa, Homo sapiens
DPGLQQTLRGQLRLLENDSREMARVLGELSARLLSIHSDQDRIVVTFKTFEEIWKFSTYHALGFTHHCLANLLMDQAFWLLLPSEEEETAIQVHVDENALRLTHESLLIQEGPFFVLCPDHHVRVMTGPRDAGNGPQALRQASGAPQGEAAPETDSSPPSPSVSSE

SEQ ID NO: 718 - protein, 55 aa, Homo sapiens
EMGIIHSFIHSLQHILCKAQVEAKQSWRLPTGAETQWTRSDIHTLTCVSRTMLQN

SEQ ID NO: 719 - protein, 46 aa, Homo sapiens
YFLEINGMSLSPQGKQLIVLPVIKLSSKNWNFRKSVLHHELYCWGY

SEQ ID NO: 720 - protein, 136 aa, Homo sapiens
PLPRRRLSVPRSASFGHTVTSGGGSRRPGMAAWSPAAAAPLLRGIRGLPLHHRMFATQTEGELRVTQILKEKFPRATAIKVTDISGGCGAMYEIKIESEEFKEKRTVQQHQMVNQALKEEIKEMHGLRIFTSVPKR

SEQ ID NO: 721 - protein, 54 aa, Homo sapiens
ELVLALIMGFIYFHELQHLHIQGLDHFRINILTREKAAQKGLRKIAQSQSRPSV

SEQ ID NO: 722 - protein, 268 aa, Homo sapiens
  SITE (3): Xaa equals any of the naturally occurring L-amino acids
QRXQGHNVTLMVQLEEGDVQRTLIQVDFGDGIAVSYVNLSSMEDGIKHVYQNVGIFRVTVQVDNSLGSDSAVLYLHVTCPLEHVHLSLPFVTTKNKEVNATAVLWPSQVGTLTYVWWYGNNTEPLITLEGSISFRFTSEGMNTITVQVSAGNAILQDTKTIAVYEEFRSLRLSFSPNLDDYNPDIPEWRRDIGRVIKKSLVEATGVPGQHILVAVLPGLPTTAELFVLPYQDPAGENKRSTDDLEHISELLIHTLNQNSVHFELKPGV

SEQ ID NO: 723 - protein, 81 aa, Homo sapiens
  SITE (27): Xaa equals any of the naturally occurring L-amino acids
  SITE (56): Xaa equals any of the naturally occurring L-amino acids
KVSSSLGITPFVTTYRTVTMVAENPIXFISPISDTFSEIKGSVMSHVITGLEHQFXAAIYVLLFPLQKFFIGYIYFSVFRL

SEQ ID NO: 724 - protein, 70 aa, Homo sapiens
  SITE (38): Xaa equals any of the naturally occurring L-amino acids
KGGKGEGSGRVAGEFLGLEGLAAAWCSALSSRQTHGPXGCLPSLVCTKARWESIFVHEIHHTYLWASIVK

SEQ ID NO: 725 - protein, 263 aa, Homo sapiens
  SITE (232): Xaa equals any of the naturally occurring L-amino acids
  SITE (236): Xaa equals any of the naturally occurring L-amino acids
  SITE (244): Xaa equals any of the naturally occurring L-amino acids
  SITE (252): Xaa equals any of the naturally occurring L-amino acids
  SITE (255): Xaa equals any of the naturally occurring L-amino acids
  SITE (260): Xaa equals any of the naturally occurring L-amino acids
  SITE (263): Xaa equals any of the naturally occurring L-amino acids
IASSKLTLTKGNKSWSSTAVAAALELVDPPGCRNSARAARARAEFGTSGDAVTLKCNFKTDGRMREIVWYRVTDGGTIKQKIFTFDAMFSTNYSHMENYRKREDLVYQSTVRLPEVRISDNGPYECHVGIYDRATREKVVLASGNIFLNVMAPPTSIEVVAADTPAPFSRYQAQNFTLVCIVSGGKPAPMPTTENIPETVVSREFPRWVHSAEPTYFLRHKPTPSSDGTVEXRALXTGTLTHRXTTRPFNLXVKXPIFQXPSX

SEQ ID NO: 726 - protein, 48 aa, Homo sapiens
  SITE (20): Xaa equals any of the naturally occurring L-amino acids
TVERNNGRGHDASLATAMHXICGDLSPEITYVLGHELNHVLVPYHLTS

SEQ ID NO: 727 - protein, 78 aa, Homo sapiens
  SITE (39): Xaa equals any of the naturally occurring L-amino acids
QNSPGQRGSISCSIRNPAIPHGWFLSGSGDTLQPPADIXNLRPRDCCCGTVCLTPASSPLLSARRMGVTAQTFPLDRL

SEQ ID NO: 728 - protein, 137 aa, Homo sapiens; identical to SEQ ID NO: 491

SEQ ID NO: 729 - protein, 87 aa, Homo sapiens; identical to SEQ ID NO: 492

SEQ ID NO: 730 - protein, 143 aa, Homo sapiens
  SITE (14): Xaa equals any of the naturally occurring L-amino acids
  SITE (45): Xaa equals any of the naturally occurring L-amino acids
VYSIPPDRPKLSAXLDMGQGHMALFICTVDSRPLALLALFHGEHXLATSLGPQVPSHGRFQAKAEANSLKLEVRELGLGDSGSYRCEATNVLGSSNTSLFFQVRGECQSSEDMVDSDALGTTLVRLWAGCCEFCAEICLFQSW

SEQ ID NO: 731 - protein, 524 aa, Homo sapiens
  SITE (138): Xaa equals any of the naturally occurring L-amino acids
  SITE (428): Xaa equals any of the naturally occurring L-amino acids
  SITE (450): Xaa equals any of the naturally occurring L-amino acids
  SITE (515): Xaa equals any of the naturally occurring L-amino acids
  SITE (516): Xaa equals any of the naturally occurring L-amino acids
GTSEDSGSYNFRFEISEVNRWSDVKGTLVTVTEEPRVPTIASPVELLEGTEVDFNCSTPYVCLQEQVRLQWQGQDPARSVTFNSQKFEPTGVGHLETLHMAMSWQDHGRILRCQLSVANHRAQSEIHLQVKYAPKGVXILLSPSGRNILPGELVTLTCQVNSSYPAVSSIKWLKDGVRLQTKTGVLHLPQAAWSDAGVYTCQAENGVGSLVSPPISLHIFMAEVQVSPAGPILENQTVTLVCNTPNEAPSDLRYSWYKNHVLLEDAHSHTLRLHLATRADTGFYFCEVQNVHGSERSGPVSVVVNHPPLTPVLTAFLETQAGLVGILHCSVVSEPLATLVLSHGGHILASTSGDSDHSPRFSGTSGPNSLRLEIRDLEETDSGEYKCSATNSLGNATSTLDFHANAARLLISPAAEVVEGQAVTLSCXSGLSPTPDARFSWYLNGALLHXGPGSSLLLPAASSTDAGSYHCRARDGHSASGPSSPAVLTVLYPPRQPTFTTRLDLDAAGAGAGRXXLLLCRVDS

SEQ ID NO: 732 - protein, 99 aa, Homo sapiens
  SITE (43): Xaa equals any of the naturally occurring L-amino acids
  SITE (48): Xaa equals any of the naturally occurring L-amino acids
GRGRWDAAEPEDGDACRVWGWDVPGRGDLSHGNAQDSAAGCWXAWPSXHAGLGLSTLHLQVLHNWFGFHPQAPLCHPHCLGAAPHFRGLAGLLQGPGWP

SEQ ID NO: 733 - protein, 106 aa, Homo sapiens
  SITE (29): Xaa equals any of the naturally occurring L-amino acids
  SITE (35): Xaa equals any of the naturally occurring L-amino acids
  SITE (41): Xaa equals any of the naturally occurring L-amino acids
QHLLDAEEGVLSGRLLPGDGPQKLSHDIXHLHQCXVAARQXLLEGVGGAGRAGQVVLQDVPTQHRVLLHHFGHVGVRVHTEVAGAHGHSQLQAQRAPADDQGQDSQ

SEQ ID NO: 734 - protein, 109 aa, Homo sapiens
ELNFPRSPRIRKRFLLRRILEMLFFTQLQVGLIQQWMVPTIQNSMKPFKDMDYSRIIERLLKLAVPNHLIWLIFFYWLFHSCLNAVAELMQFGRPGVLPGLVGIPSLFT

SEQ ID NO: 735 - protein, 94 aa, Homo sapiens; identical to SEQ ID NO: 502
  SITE (63): Xaa equals any of the naturally occurring L-amino acids

SEQ ID NO: 736 - protein, 67 aa, Homo sapiens
  SITE (26): Xaa equals any of the naturally occurring L-amino acids
  SITE (60): Xaa equals any of the naturally occurring L-amino acids
GSNEKHKYSWPSVSAGSVTTNTGGGXTIPENALQTKLYDSLNGFKTNELKDITAQHEMYXTFNNIFL

SEQ ID NO: 737 - protein, 93 aa, Homo sapiens
DSGDFPALVGTDTQVLKGGGAVRGVIGNRGAGEHHFNRTFHRSGGEGRQQRIASQEQLAAKPSADIRGDNTHILHGNFQRFCQIGAAPVNHLI

SEQ ID NO: 738 - protein, 116 aa, Homo sapiens
VTELSCSRISPCFVLKKKKKRFAYTPLLCSFTSSLGISELVTRSLKPSQSGRPSAFCLSGTTGFGLSPIVSLQAFQPFFLELTLPYSVVRGEAFTLKATVFNYLSTCIRVRTLLWK

SEQ ID NO: 739 - protein, 116 aa, Homo sapiens
  SITE (54): Xaa equals any of the naturally occurring L-amino acids
  SITE (105): Xaa equals any of the naturally occurring L-amino acids
  SITE (114): Xaa equals any of the naturally occurring L-amino acids
NLSFICSAASSSDSPMTLGWKKDNELLHDAEMENYAHLRAQGGEVMEYTTILRXREVEFASEGKYQCVISNHFGSSYSVKAKLTVNMLPSFTKDPHGISPSELGXWHAWGCAAXGG

SEQ ID NO: 740 - protein, 226 aa, Homo sapiens
  SITE (156): Xaa equals any of the naturally occurring L-amino acids
LARGAFSGLDKLRRLILQGNRIRSITKKAFTGLDALEHLDLSDNAIMSLQGNAFSQMKKLQQLHLNTSSLLCDCQLKWLPQWVAENNFQSFVNASCAHPQLLKGRSIFAVSPDGFVCDDFPKPQITVQPETQSAIKGSNLSFICSAASSSDSPMTXAWKKDNELLHDAEMENYAHLRAQGGEVMEYTTILRLREVEFASEGKYQCVISNHFGSSYSVKAKLTVNSM

SEQ ID NO: 741 - protein, 37 aa, Homo sapiens
  SITE (29): Xaa equals any of the naturally occurring L-amino acids
  SITE (35): Xaa equals any of the naturally occurring L-amino acids
IIPALYHFLNRSYFIIFCTLYLIKCVNLXAQAPIXYQ

SEQ ID NO: 742 - protein, 173 aa, Homo sapiens
  SITE (24): Xaa equals any of the naturally occurring L-amino acids
  SITE (120): Xaa equals any of the naturally occurring L-amino acids
  SITE (158): Xaa equals any of the naturally occurring L-amino acids
  SITE (160): Xaa equals any of the naturally occurring L-amino acids
  SITE (170): Xaa equals any of the naturally occurring L-amino acids
  SITE (172): Xaa equals any of the naturally occurring L-amino acids
ALRYAGLDDTDSEDELPPGWEERXTKDGWVYYANHTEEKTQWEHPKTGKRKRVAGDLPYGWEQETDENGQVFFVDHINKRTTYLDPRLAFTVDDNPTKPTTRQRYDGSTTAMEILQGRDXTGKVVVVTGANSGIGFETAKSFALHGAHVILACRNMEXPXNNVTILEEWXKXR

SEQ ID NO: 743 - protein, 114 aa, Homo sapiens
  SITE (19): Xaa equals any of the naturally occurring L-amino acids
  SITE (20): Xaa equals any of the naturally occurring L-amino acids
  SITE (105): Xaa equals any of the naturally occurring L-amino acids
HDSTDGRGRGDGLLLPRQXXPSYSLEIQWWYVRSHRDWTDKQAWASNQVVKVVGSNISHKLRLSRVKPTDEGTYECRVIDFSDGKARHHKVKAYCGCSQGRIRLXCPKPFRRAV

SEQ ID NO: 744 - protein, 105 aa, Homo sapiens
  SITE (86): Xaa equals any of the naturally occurring L-amino acids
STHASAHASGTEARAKRKQLLLFTSVILGSLALSRGAVHSSEPKVSVAENSPAKLLCSYSGFSSPRVEWKFAQGDITSLVCYNNKXTASYEDRVTFSHSGIISIL

SEQ ID NO: 745 - protein, 105 aa, Homo sapiens
  SITE (12): Xaa equals any of the naturally occurring L-amino acids
  SITE (102): Xaa equals any of the naturally occurring L-amino acids
  SITE (103): Xaa equals any of the naturally occurring L-amino acids
DSSTVKGGSESXHLCLIPDLKGKARTRISNLRKEDQSVYFCQVQLDIQIREAVVAVHQGDPPHHHPGPQAAPPQGPSPAWTALLVSPVPWRRTRPWVGPCCXXCC

SEQ ID NO: 746 - protein, 96 aa, Homo sapiens
  SITE (78): Xaa equals any of the naturally occurring L-amino acids
  SITE (88): Xaa equals any of the naturally occurring L-amino acids
  SITE (96): Xaa equals any of the naturally occurring L-amino acids
WKAMESALPAAGFLYWVGAGTVAYLALRISYSLFTALRVWGVGNEAGVGPGLGEWAVVTGSTDGIGKSYAEELAKHGXKVVLISRSKXKLDQVSSX

SEQ ID NO: 747 - protein, 144 aa, Homo sapiens
  SITE (4): Xaa equals any of the naturally occurring L-amino acids
  SITE (81): Xaa equals any of the naturally occurring L-amino acids
  SITE (100): Xaa equals any of the naturally occurring L-amino acids
  SITE (108): Xaa equals any of the naturally occurring L-amino acids
  SITE (109): Xaa equals any of the naturally occurring L-amino acids
  SITE (112): Xaa equals any of the naturally occurring L-amino acids
  SITE (113): Xaa equals any of the naturally occurring L-amino acids
  SITE (117): Xaa equals any of the naturally occurring L-amino acids
  SITE (119): Xaa equals any of the naturally occurring L-amino acids
GPEXSSPRLHVAVAPNTLRLEIHGAMLEDEGVYICEASNTLGQASASADFDAQAVNVQVWPGATVREGQLVNLTCLVWTTXPAQLTYTWYQDGQQRLDAXSIPLPNVXXRDXXSYRXGXGPPGRAPRLSRPITLDVSTRPATCA

SEQ ID NO: 748 - protein, 87 aa, Homo sapiens
IPLKATCEPGCKFGECVGPNKCRCFPGYTGKTCSQGYLTMTGDNFGCHNWMWEVLPASSEWSPGMPLNILQCTGQSPQQIMICVNGS

SEQ ID NO: 749 - protein, 234 aa, Homo sapiens; identical to SEQ ID NO: 527

SEQ ID NO: 750 - protein, 154 aa, Homo sapiens
  SITE (58): Xaa equals any of the naturally occurring L-amino acids
  SITE (68): Xaa equals any of the naturally occurring L-amino acids
  SITE (151): Xaa equals any of the naturally occurring L-amino acids
  SITE (152): Xaa equals any of the naturally occurring L-amino acids
GEQMELKKLMEHIFITPDYRQAWKVVHKLSDILLLTICAVISGAEGWEDIEDFGETHXDFLKQYGDFXNGIPVHDTIARVVSCICPAKFHESFINWMLDYHSSDDKDVIAIEWKNYTGILMTRVAVRKAIHVISAFSTMAQSGHRTDQDGXXIQ

SEQ ID NO: 751 - protein, 124 aa, Homo sapiens
  SITE (102): Xaa equals any of the naturally occurring L-amino acids
LPFNFVDPNMDSREGEDKELKIDLEVFEMPPRFIMPICDFKIPENSDAVFKCSVIGIPTPEVKWYKEYMCIEPDNIKYVISEEKGSHTLKIRNVCLSDSAHXRCRAVELCRRGYLSGIPHHGRF

SEQ ID NO: 752 - protein, 291 aa, Homo sapiens
  SITE (61): Xaa equals any of the naturally occurring L-amino acids
  SITE (62): Xaa equals any of the naturally occurring L-amino acids
  SITE (198): Xaa equals any of the naturally occurring L-amino acids
  SITE (221): Xaa equals any of the naturally occurring L-amino acids
GRACTCGGTIREKEVKNQNYCGATEEKADKDQKYSGATKEKADKDQKYSGATEEEEGENQXXSVTPGHKKRGPSKKKPGAAKVEKRKTRTPKCKVPGCFLQDLEKSKKYSGKNLKRNKDELVQRIYDLFNRSVCDKKLPEKLRIGWNNKMVKTAGLCSTGEMWYPKWRRFAKIQIGLKVCDSADRIRDTLIHEMCHAXSWLIDGIHDSHGDAWKYYARKSXRIHPELPRVTRCHNYKINYKVHYECTGCKTRIGCYTKSLDTSRFICAKCKGSLVMVPLTQKDGTRIVPHV

SEQ ID NO: 753 - protein, 162 aa, Homo sapiens
LTTVVLLCLLTPSWTSTGRMWSHLNRLLFWSIFSSVTCRKAVLDCEAMKTNEFPSPCLDSKTKVVMKGQNVSMFCSHKNKSLQITYSLFRRKTHLGTQDGKGEPAIFNLSITEAHESGPYKCKAQVTSCSKYSRDFSFTIVDPVTSPVLEHYGHSNRNRPYI

SEQ ID NO: 754 - protein, 115 aa, Homo sapiens
  SITE (79): Xaa equals any of the naturally occurring L-amino acids
  SITE (111): Xaa equals any of the naturally occurring L-amino acids
TLPPSAHTLWPVPAMARLLRSATWELFPWRAYCSQKAKGELCRDFVEALKAVVGGSHVSTAAVVREQHGRDESVHRCEXPDAVVWPQNVEQVSRLAALCYRQGVPIIPFGXRQRA

SEQ ID NO: 755 - protein, 99 aa, Homo sapiens
  SITE (1): Xaa equals any of the naturally occurring L-amino acids
  SITE (9): Xaa equals any of the naturally occurring L-amino acids
XRTRLWFVXDRPQINGKYILHDNGTLVIKEATAYDRGNYICKAQNSVGHTLITVPVMIVAYPPRITNRPPRSIVTRTGAAFQLHCVPWESQARNHVGDA

SEQ ID NO: 756 - protein, 127 aa, Homo sapiens
LKPAKIDHKQYFRKQVLHGKDFQVDCKASGSPVPEISWSLPDGTMINNAMQADDSGHRTRRYTLFNNGTLYFNKVGVAEEGDYTCYAQNTLGKDEMKVHLTVITAAPRIRQSNKTNKRIKAGDTACP

SEQ ID NO: 757 - protein, 140 aa, Homo sapiens
SCRSCRRNRRTSESSGGVCFTAWKCECAKMRKVVLITGASSGIGLALCKRLLAEDDELHLCLACRNMSKAEAVCAALLASHPTAEVTIVQVDVSNLQSVFRASKELKQRFQRLDCIYLNAGIMPNPQLNIKALFFGLFSS

SEQ ID NO: 758 - protein, 238 aa, Homo sapiens
  SITE (5): Xaa equals any of the naturally occurring L-amino acids
SMTSXPEVNVENAAHPCVRAPCAHGGSCRPRKEGYDCDCPLGFEGLHCQKAIIEAIEIPQFIGRSYLTYDNPDILKRVSGSRSNVFMRFKTTAKDGLLLWRGDSPMRPNSDFISLGLRDGALVFSYNLGSGVASIMVNGSFNDGRWHRVKAVRDGQSGKITVDDYGARTGKSPGMMRQLNINGALYVGGMKEIALHTNRQYMRGLVGCISHFTLSTDYHISLVEDAVDGKNINTCGAK

SEQ ID NO: 759 - protein, 59 aa, Homo sapiens
  SITE (39): Xaa equals any of the naturally occurring L-amino acids
  SITE (50): Xaa equals any of the naturally occurring L-amino acids
FGHILSGFYVTCRLEKITRNPDSSSLSLIHLAFGKFKNXVWSTRWWLIIXLWGVRNLMP

SEQ ID NO: 760 - protein, 134 aa, Homo sapiens
  SITE (3): Xaa equals any of the naturally occurring L-amino acids
  SITE (107): Xaa equals any of the naturally occurring L-amino acids
  SITE (116): Xaa equals any of the naturally occurring L-amino acids
  SITE (134): Xaa equals any of the naturally occurring L-amino acids
QQXGTLCINYANEKLQQHFVAHYLRAQQEEYAVEGLEWSFINYQDNQPCLDLIEGSPISICSLINEVGRNAASIDPAAAAQLQTRIETALEAAPAWATISSAGSPAXLWCIMRGLXGTTQQAWWRRTRTLSHLX

SEQ ID NO: 761 - protein, 108 aa, Homo sapiens
  SITE (66): Xaa equals any of the naturally occurring L-amino acids
  SITE (108): Xaa equals any of the naturally occurring L-amino acids
ARGTGQRLRASSTPRTSRTSTGRTGTAAGPWAARRRAGAHLPPLRAGRPARPAGAAHAASGSLLRXFDGARPPPSGPLRLGTAALLLTFRSDARGHAQGFALTYRGLX

SEQ ID NO: 762 - protein, 645 aa, Homo sapiens
PGLQEFGTRTSPVTLSPHKHVSGFSSSLRTSSTGDAGGGSRRPHRKPTILRKISAAQQLSASEVVTHLGQTVALASGTLSVLLHCEAIGHPRPTISWARNGEEVQFSDRILLQPDDSLQILAPVEADVGFYTCNATNALGYDSVSIAVTLAGKPLVKTSRMTVINTEKPAVTVDIGSTIKTVQGVNVTINCQVAGVPEAEVTWFRNKSKLGSPHHLHEGSLLLTNVSSSDQGLYSCRAANLHGELTESTQLLILDPPQVPTQLEDIRALLAATGPNLPSVLTSPLGTQLVLDPGNSALLGCPIKGHPVPNITWFHGGQPIVTATGLTHHILAAGQILQVANLSGGSQGEFSCLAQNEAGVLMQKASLVIQDYWWSVDRLATCSASCGNRGVQQPRLRCLLNSTEVNPAHCAGKVRPAVQPIACNRRDCPSRWMVTSWSACTRSCGGGVQTRRVTCQKLKASGISTPVSNDMCTQVAKRPVDTQACNQQLCVEWAFSSWGQCNGPCVGPHLAVQHRQVFCQTRDGITLPSEQCSALPRPVSTQNCWSEACSVHWRVSLWTLCTATCGNYGFQSRRVECVHARTNKAVPEHLCSWGPRPANWQRCNITPCENMECRDTTRYCEKVKQLKLCQLSQFKSRCCGTCGKA

SEQ ID NO: 763 - protein, 116 aa, Homo sapiens
  SITE (101): Xaa equals any of the naturally occurring L-amino acids
  SITE (102): Xaa equals any of the naturally occurring L-amino acids
LSPHKHVSGFSSSLRTSSTGDAGGGSRRPHRKPTILRKISAAQQLSASEVVTHLGQTVALASGTLSVLLHCEAIGHPRPTISWARNGEEVQFSDRILLQPXXSLQILAPVEANVGF

SEQ ID NO: 764 - protein, 122 aa, Homo sapiens
DWTRSSPQWLGLRRGMGFFSKETPFSSTLVPAQETPRSFECTCPRGFYGLRCEVSGVTCADGPCFNGGLCVGGADPDSAYICHCPPGFQGSNCEKRVDRCSLQPCRNGEGWSLNGEGWGWGS

SEQ ID NO: 765 - protein, 186 aa, Homo sapiens
LEPPASDPELQPAERPLPSPGSGEGAPVFLTGPRSQWVLRGAEVVLTCRAGGLPEPTLYWEKDGMALDEVWDSSHFALQPGRAEDGPGASLALRILAARLPDSGVYVCHARNAPRPRAGGALLQVHQPPESPPADPDEGPRAGGGALKCAPKTFWVNEGKHSQVPLLRDGQARARDRMALGGPPAA

SEQ ID NO: 766 - protein, 174 aa, Homo sapiens
  SITE (99): Xaa equals any of the naturally occurring L-amino acids
  SITE (104): Xaa equals any of the naturally occurring L-amino acids
  SITE (133): Xaa equals any of the naturally occurring L-amino acids
  SITE (145): Xaa equals any of the naturally occurring L-amino acids
  SITE (169): Xaa equals any of the naturally occurring L-amino acids
AGGQQTLGHQPALVHPPAARQVHSEGSVLPGARPEPEAPVPGGPAVPLLPQGCECCMSCAVQGSPRPHVTWFKNDRSLEGNPAVYSTDLLGVCSLTIPXVSPKXSGEYKAVAENTLGQAVSTATLIVIEPSTXPHLTLGWSWTLXSFTSDTCTGPGSQSQGWKLCPEPXENGSE

SEQ ID NO: 767 - protein, 63 aa, Homo sapiens
IIFAGGDKWSVDPRVSISTLNKRDYSLQIQNVDVTDDGPYTCSVQTQHTPRTMQVHLNCASSS

SEQ ID NO: 768 - protein, 254 aa, Homo sapiens
TDSRSTHASDMELFLAGRRVLVTGAGKGIGRGTVQALHATGARVVAVSRTQADLDSLVRECPGIEPVCVDLGDWEATERALGSVGPVDLLVNNAAVALLQPFLEVTKEAFDRSFEVNLRAVIQVSQIVARGLIARGVPGAIVNVSSQCSQRAVTNHSVYCSTKGALDMLTKVMALELGPHKIRVNAVNPTVVMTSMGQATWSDPHKAKTMLNRIPLGKFAEVEHVVNAILFLLSDRSGMTTGSTLPVEGGFWAC

SEQ ID NO: 769 - protein, 204 aa, Homo sapiens
  SITE (142): Xaa equals any of the naturally occurring L-amino acids
  SITE (172): Xaa equals any of the naturally occurring L-amino acids
  SITE (174): Xaa equals any of the naturally occurring L-amino acids
RSRTSGSPGLQEFGTSTIQNRADLVINEVMWWDHGVYYCTIEAPGDTSGDPDKEVKLIVLHWLTVIFIILGALLLLLLIGVCWCQCCPQYCCCYIRCPCCPAHCCCPEEALARHRYMKQAQALGPQMMGKPLYWGADRSSQXSSYPMHPLLQRDLSLPSSLPQMPMTQTTNXPXIANGVLEYLEKELRNLNLAQPLPPDLKGRF

SEQ ID NO: 770 - protein, 46 aa, Homo sapiens
  SITE (15): Xaa equals any of the naturally occurring L-amino acids
  SITE (17): Xaa equals any of the naturally occurring L-amino acids
  SITE (28): Xaa equals any of the naturally occurring L-amino acids
AITAKRSIRASSDVXRXLCGTTAIEWTXCRQVVEALGYGGADEHES

SEQ ID NO: 771 - protein, 249 aa, Homo sapiens
  SITE (2): Xaa equals any of the naturally occurring L-amino acids
  SITE (5): Xaa equals any of the naturally occurring L-amino acids
  SITE (8): Xaa equals any of the naturally occurring L-amino acids
  SITE (13): Xaa equals any of the naturally occurring L-amino acids
  SITE (37): Xaa equals any of the naturally occurring L-amino acids
LXDLXLIXTTVPXMAFNYLSGSKSISMAGCATQIFFXTSLLGSECFLLAVMAYDRYTAICHPLRYTNLMSPKICGLMTAFSWILGSTDGIIYAVATFSFSYCGSREIAHFFCELPSLLILSCNDTSIFEKVIFICSIVMLVFPVAIIIASYAGVILAVIHMGSGEGRRKAFTTCSSHLMVVGMFYGAGLFMYIQPTSDRSPTQDKLVSVFYTILTPMLNPLIYSLRNKEVTRAFMKISGKGKSGERVTS

SEQ ID NO: 772 - protein, 315 aa, Homo sapiens
  SITE (224): Xaa equals any of the naturally occurring L-amino acids
  SITE (229): Xaa equals any of the naturally occurring L-amino acids
  SITE (289): Xaa equals any of the naturally occurring L-amino acids
  SITE (315): Xaa equals any of the naturally occurring L-amino acids
GWSRVSCRCTEGFRLAADGRSCEDPCAQAPCEQQCEPGGPQGYSCHCRLGFRPAEDDPHRCVDTDECQIAGVCQQMCVNYVGGFECYCSEGHELEADGISCSPAGAMGAQASQDLGDELLDDGEDEEDEDEAWKAFNGGWTEMPGILWMEPTQPPDFALAYRPSFPEDREPQIPYHSSVLSVTRPVVVSATRPTLPSAHQPPVILATQPVLSRDHQIPVIAANXPDLPXAYQPGILSVSHSAQPPAHQPPMISTKYPELFPAHQSPMFPDTRPVVVSATRPTLPSANVXLFGGPACTGHRGLYPLWPPCTQQAHX

SEQ ID NO: 773 - protein, 188 aa, Homo sapiens
  SITE (97): Xaa equals any of the naturally occurring L-amino acids
  SITE (187): Xaa equals any of the naturally occurring L-amino acids
  SITE (188): Xaa equals any of the naturally occurring L-amino acids
NECIPHNGCRHGTCSTPWQCTCDEGWGGLFCDQDLNYCTHHSPCKNGATCSNSGQRSYTCTCRPGYTGVDCELELSECDSNPCRNGGSCKDQEDGYXCLCPPGYYGLHCEHSTLSCADSPCFNGGSCRERNQGANYACECPPNFTGSNCEKKVDRCTSNPCANGGQCLNRGPSRMCRCRLDSRHLLXX

SEQ ID NO: 774 - protein, 197 aa, Homo sapiens
  SITE (170): Xaa equals any of the naturally occurring L-amino acids
  SITE (178): Xaa equals any of the naturally occurring L-amino acids
GTSLHVGVCSHMEYPCRFQNASATTQEIIPHRVFAPVCLTGACQETLLRLIPPCLSAAHSVLGAHPFSRLDVLIVPANFPSLGMASPHIMFLSQSILTGGNHLCGTRLCHEIAHAWFGLAIGARDWTEEWLSEGFATHLEDVFWATAQQLAPYEAREQQELRACLRWRRXQDEMQCSXEEMQVLRFPHVGGCSGSFS

SEQ ID NO: 775 - protein, 164 aa, Homo sapiens
  SITE (153): Xaa equals any of the naturally occurring L-amino acids
NTTHYRESWYACRYRSGIPGSTHASASTFLIIDPLLGLLKIQETQDLDAGDYTCVAINEAGRATGKITLDVGSPPVFIQEPADVSMEIGSNVTLPCYVQGYPEPTIKWRRLDNMPIFSRPFSVSSISQLRTGALFILSRLKEIYFVRICTFMXYIYALYIGIAI

SEQ ID NO: 776 - protein, 193 aa, Homo sapiens
  SITE (8): Xaa equals any of the naturally occurring L-amino acids
  SITE (37): Xaa equals any of the naturally occurring L-amino acids
  SITE (47): Xaa equals any of the naturally occurring L-amino acids
  SITE (155): Xaa equals any of the naturally occurring L-amino acids
  SITE (163): Xaa equals any of the naturally occurring L-amino acids
  SITE (173): Xaa equals any of the naturally occurring L-amino acids
  SITE (180): Xaa equals any of the naturally occurring L-amino acids
  SITE (187): Xaa equals any of the naturally occurring L-amino acids
QSWTSPFXFSRPTSMHCPGRGPQDLRLDAFAGPCYSXTSRLHPQGPXSCHIHMNTWNVNRAGCESLAVKVFAYPMASIEWRKDGLDIQLPGDDPHISVQFRGGPQRFEVTGWLQIQAVRPSDEGTYRCLARNALGQVEAPASLTVLTPDQLNSTXIPQLRSLXLVPEEEAESXENDDYYXVQNSGPXGLGNRL

SEQ ID NO: 777 - protein, 166 aa, Homo sapiens
  SITE (72): Xaa equals any of the naturally occurring L-amino acids
EVLVARGVRVKVNEAYRFRVALPAYPASLTDVSLALSELRPNDSGIYRCEVQHGIDDSSDAVGGQGQRGRLXLPRGLCRYAFSFSGAQEACARIGAHIATPEQLYAAYLGGYEQCDAGWLSDQTVSIPSRPHERPVTETWMASPGSGTMVWWTRMTSMMCTVMLKT

SEQ ID NO: 778 - protein, 154 aa, Homo sapiens
PERRSPGPAPRAPRLVGRGDCDPLLSVCLTTMPLYEGLGSGGEKTAVVIDLGEAFTKCGFAGETGPRCIIPSVIKRAGMPKPVRVVQYNINTEELYSYLKEFIHILYFRHLLVNPRDRRVVIIESVLCPSHFRETLTRVLFKYFEVPSVFISNK

SEQ ID NO: 779 - protein, 44 aa, Homo sapiens
FTEQAFATFCSVKRNNVIAWHNAGHNFAHFYHYAGTFVSQHGSC

SEQ ID NO: 780 - protein, 151 aa, Homo sapiens
  SITE (84): Xaa equals any of the naturally occurring L-amino acids
  SITE (91): Xaa equals any of the naturally occurring L-amino acids
  SITE (109): Xaa equals any of the naturally occurring L-amino acids
  SITE (117): Xaa equals any of the naturally occurring L-amino acids
  SITE (143): Xaa equals any of the naturally occurring L-amino acids
  SITE (147): Xaa equals any of the naturally occurring L-amino acids
RLLRTRPGQCPSLQKPSGQLRQEELQTTACEAGVDFVYKTKLESVEVSASNPYVYYNTQLEDIIKSGTDPATPLAMKKFVSHAXCHDSLGXARTGIVPPSMGQKSELWXINLDYSYXLGKETSPSLWAANGNASRKIGGQWRXLGFXDPGA

SEQ ID NO: 781 - protein, 145 aa, Homo sapiens
IPVRYLPWADLSFLLGHPIPTVLQATLKYNVLLPKKASGFSLSLEIVKNYSLTVFDLTVNLKYTGIRNKSSMVVIDVKMLSGFTPTMSSIEELENKGQVMKTEVKNDHVLFYLENVFGRADSFTFSAEQSNLVFNIQPAPGMVYD

SEQ ID NO: 782 - protein, 294 aa, Homo sapiens
  SITE (85): Xaa equals any of the naturally occurring L-amino acids
  SITE (142): Xaa equals any of the naturally occurring L-amino acids
  SITE (265): Xaa equals any of the naturally occurring L-amino acids
ESVSLELPVDIVPDSTKAYVTVLGDIMGTALQNLDGLVQMPSGCGEQNMVLFAPIIYVLQYLEKAGLLTEEIRSRAVGFLEIGYXKELMYKHSNGSYSAFGERDGNGNTWLTAFVTKCFGQAQKFIFIDPKNIQDALKWMAXNQLPSGCYANVGNLLHTAMKGGVDDEVSLTAYVTAALLEMGKDVDDPMVSQGLRCLKNSATSTTNLYTQALLAYIFSLAGEMDIRNILLKQLDQQAIISGESIYWSQKPTPSSNASPWSEPAXVDVELTAYALLAQLTKPSLTQKEIARPLA

SEQ ID NO: 783 - protein, 322 aa, Homo sapiens
YPDSYPPNKECIYILEAAPRQRIELTFDEHYYIEPSFECRFDHLEVRDGPFGFSPLIDRYCGVKSPPLIRSTGRFMWIKFSSDEELEGLGFRAKYSFIPDPDFTYLGGILNPIPDCQFELSGADGIVRSSQVEQEEKTKPGQAVDCIWTIKATPKAKIYLRFLDYQMEHSNECKRNFVAVYDGSSSIENLKAKFCSTVANDVMLKTGIGVIRMWADEGSRLSRFRMLFTSFVEPPCTSSTFFCHSNMCINNSLVCNGVQNCAYPWDENHCKEKKKAGVFEQITKTHGTIIGITSGIVLVLSLFYFSTSETASKKGHGLQNRF

SEQ ID NO: 784 - protein, 222 aa, Homo sapiens; identical to SEQ ID NO: 586
  SITE (124): Xaa equals any of the naturally occurring L-amino acids
  SITE (145): Xaa equals any of the naturally occurring L-amino acids

SEQ ID NO: 785 - protein, 147 aa, Homo sapiens
  SITE (142): Xaa equals any of the naturally occurring L-amino acids
ASPPWRLCCFFSLELFLHPVLRASSSTPIEGSPMTLTCETQLSPQRPDVQLQFSLFRDSQTLGLGWSRSPRLQIPAMWTEDSGSYWCEVETVTHSIKKRSLRSQIRVQSECLRGCSSRVRAGERKASDISCTPRMVDITERXVQLFW

SEQ ID NO: 786 - protein, 111 aa, Homo sapiens
  SITE (53): Xaa equals any of the naturally occurring L-amino acids
  SITE (101): Xaa equals any of the naturally occurring L-amino acids
GTQEEIKCMDQIKKIETTGCNQEITSFEINLKEKKYQEDFNPLVRGCSCYCCXITLGAYIHHLLVTNELLAGVLLMMHNFEHYFGFFHYIREALKSDKLAXLKELIHRQAS

SEQ ID NO: 787 - protein, 102 aa, Homo sapiens
QSCGRHFTKSYNLLIHERTHTDERPYTCDICHKAFRRQDHLRDHRYIHSKEKPFKCQECGKGFCQSRTLAVHKTLHMQTSSPTAASSAAKCSGETVICGGTA

SEQ ID NO: 788 - protein, 90 aa, Homo sapiens
  SITE (12): Xaa equals any of the naturally occurring L-amino acids
  SITE (89): Xaa equals any of the naturally occurring L-amino acids
SKLSPGLGSPIXGLSKLTPDRKPSRGRLPSKTKKEFICSFAGRHFTKSYNLLIHERTHTDERPYTCDICHKAFPALPFTTHLFHPKQGXI

SEQ ID NO: 789 - protein, 144 aa, Homo sapiens
  SITE (85): Xaa equals any of the naturally occurring L-amino acids
  SITE (99): Xaa equals any of the naturally occurring L-amino acids
NPQSSSSEGSSEIFQVNGHNRLLVQRSEVTQAPGQYTVDVEGHGCTFIQATLKYNVLLPKKASGFSLSLEIVKNYSSTAFDLTVXLKYTGIRNKSSMVXIDVKMLSGFTPTMSSIEELLPVFMKTSRHQGMFHKTELDVEKSGH

SEQ ID NO: 790 - protein, 371 aa, Homo sapiens; identical to SEQ ID NO: 600

SEQ ID NO: 791 - protein, 125 aa, Homo sapiens
  SITE (104): Xaa equals any of the naturally occurring L-amino acids
GKNTVVAIAVWSHFSTFPLEVYIRRLRNIRRAVVRLLDRSPKTVVVIRTANAQELGPEVSLFNSDWYNFQLDTILRRMFSGVGVYLVDAWEMTLAHYLPHKLHXDEVIVKNQLDMFLSFVCPLET

SEQ ID NO: 792 - protein, 127 aa, Homo sapiens
  SITE (83): Xaa equals any of the naturally occurring L-amino acids
  SITE (92): Xaa equals any of the naturally occurring L-amino acids
  SITE (102): Xaa equals any of the naturally occurring L-amino acids
HNDGLGNAFDGPGGALAHAFLPRRGEAHFDQDERWSLSRRRGRNLFVVLAHEIGHTLGLTHSPAPRALMAPYYKRLGRDALLXWDDVLAVQXLYGKPLGGSXAVQLPGKLFTDFETWDSYSPQGRRP

SEQ ID NO: 793 - protein, 315 aa, Homo sapiens
  SITE (121): Xaa equals any of the naturally occurring L-amino acids
  SITE (252): Xaa equals any of the naturally occurring L-amino acids
LWTISNPVTLTCDATGIPPPTIAWLKNHKRIENSDSLEVRILSGGSKLQIARSQHSDSGNYTCIASNMEGKAQKYYFLSIQVPPSVAGAEIPSDVSVLLGENVELVCNANGIPTPLIQWLXDGKPIASGETERIRVSANGSTLNIYGALTSDTGKYTCVATNPAGEEDRIFNLNVYVTPTIRGNKDEAEKLMTLVDTSINIECRATGTPPPQINWLKNGLPLPLSSHIRLLAAGQVIRIVRAQVSDVAVYTXVASNRAGVDNKHYNLQVFAPRKKKKKKKKKKKKKKKKKKKKGGRSRGSLEGPQVTRACDVIAL

SEQ ID NO: 794 - protein, 550 aa, Homo sapiens
  SITE (25): Xaa equals any of the naturally occurring L-amino acids
  SITE (26): Xaa equals any of the naturally occurring L-amino acids
  SITE (367): Xaa equals any of the naturally occurring L-amino acids
  SITE (515): Xaa equals any of the naturally occurring L-amino acids
  SITE (520): Xaa equals any of the naturally occurring L-amino acids
HYRRYACRYRSGIPGSTHASAHASXXASAHASGLALGMGQGLKAWPRYRVVGSADAGQYNLEITDAELSDDASYECQATEAALRSRRAKLTVLIPPEDTRIDGGPVILLQAGTPHNLTCRAFNAKPAATIIWFRDGTQQEGAVASTELLKDGKRETTVSQLLINPTDLDIGRVFTCRSMNEAIPSGKETSIELDVHHPPTVTLSIEPQTVQEGERVVFTCQATANPEILGYRWAKGGFLIEDAHESRYETNVDYSFFTEPVSCEVHNKVGSTNVSTLVNVHFAPRIVVDPKPTTTDIGSDVTLTCVWVGNPPLTLTWTKKDSNMGPRPPGSPPEAALSAQVLSNSNQLLLKSVTQADAGTYTCRAIXPRIGVAEREVPLYVNGPPIISSEAVQYAVRGDGGKVECFIGSTPPPDRIAWAWKENFLEVGTLERYTVERTNSGSGVLSTLTINNVMEADFQTHYNCTAWNSFGPGTAIIQLEEREVLPVGIIAGATIGASILLIFFFIALVFFLYRXRKGSXKDVTLRKLDIKVETVNREPLTMHSDREDDT

SEQ ID NO: 795 - protein, 204 aa, Homo sapiens
  SITE (196): Xaa equals any of the naturally occurring L-amino acids
HYRRYACRYRSGIPGSTHASAHASAHASVTAEHSGNYSCDADNGLGAQHSHGVSLRVTVPVSRPVLTLRAPGAQAVVGDLLELHCESLRGSFPILYWFYHEDDTLGNISAHSGGGASFNLSLTTEHSGNYSCEADNGLGAQHSKVVTLNVTGTSRNRTGLTAAGITGLVLSILVLAAAAALLHYARARRKPGGLSXTGTSSHKS

SEQ ID NO: 796 - protein, 169 aa, Homo sapiens
  SITE (63): Xaa equals any of the naturally occurring L-amino acids
  SITE (160): Xaa equals any of the naturally occurring L-amino acids
  SITE (163): Xaa equals any of the naturally occurring L-amino acids
MLGEGQVLRSPTNRLLLHFQSPRVPRGGGFRIHYQAYLLSCGFPPRPAHGDVSVTDLHPGGTXTFHCDSGYQLQGEETLICLNGTRPSWNGETPSCMASCGGTIHNATLGRIVSPEPGGAVGPNLTCRWVIEAAEGRRLHLHFERVSLDEDNDRLMVRSXGKXPIPRDL

SEQ ID NO: 797 - protein, 201 aa, Homo sapiens
RPLEINPTKGNKSWSSTAVAAALELVDPPGCRNSARDGGPDRAQVLPRVDAAARRGGLLSAECSAGLCFHGGRCVPGSAQPCHCPPGFQGPRCQYDVDECRTHNGGCQHRCVNTPGSYLCECKPGFRLHTDSRTCLAINSCALGNGGCQHHCVQLTITRHRCQCRPGFQLQEDGRHCVRECCSLGGRTWGWRQDKLPRLAC

SEQ ID NO: 798 - protein, 409 aa, Homo sapiens
  SITE (68): Xaa equals any of the naturally occurring L-amino acids
KDCSLDCAGSPQKPLCASDGRTFLSRCEFQRAKCKDPQLEIAYRGNCKDVSRCVAERKYTQEQARKEXQQVFIPECNDDGTYSQVQCHSYTGYCWCVTPNGRPISGTAVAHKTPRCPGSVNEKLPQREGTGKTDDAAAPALETQPQGDEEDIASRYPTLWTEQVKSRQNKTNKNSVSSCDQEHQSALEEAKQPKNDNVVIPECAHGGLYKPVQCHPSTGYCWCVLVDTGRPIPGTSTRYEQPKCDNTARAHPAKARDLYKGRQLQGCPGAKKHEFLTSVLDALSTDMVHAASDPSSSSGRLSEPDPSHTLEERVVHWYFKLLDKNSSGDIGKKEIKPFKRFLRKKSKPKKCVKKFVEYCDVNNDKSISVQELMGCLGVAKEDGKADTKKRHTPRGHAESTSNRQPRKQG

SEQ ID NO: 799 - protein, 183 aa, Homo sapiens
PTRPVIEGNLISLLCESSGIPPPNLIWKKKGSPVLTDSMGRVRILSGGRQLQISIAEKSDAALYSCVASNVAGTAKKEYNLQVYIRPTITNSGSHPTEIIVTRGKSISLECEVQGIPPPTVTWMKDGVMHPRTTFLMVDEEQTVPFALRDENLKGVVYTTRPLREAETYRMRVRASSTVQWDH

SEQ ID NO: 800 - protein, 800 aa, Homo sapiens
  SITE (197): Xaa equals any of the naturally occurring L-amino acids
  SITE (201): Xaa equals any of the naturally occurring L-amino acids
  SITE (687): Xaa equals any of the naturally occurring L-amino acids
WIPRAAGIRHEGAWSAWQPWGTCSESCGKGTQTRARLCNNPPPAFGGSYCDGAETQMQVCNERNCPIHGKWATWASWSACSVSCGGGARQRTRGCSDPVPQYGGRKCEGSDVQSDFCNSDPCPTHGNWSPWSGWGTCSRTCNGGQMRRYRTCDNPPPSNGGRACGGPDSQIQRCNTDMCPVDGSWGSWHSWSQCSAXCGGXEKTRKRLCDHPVPVKGGRPCPGDTTQVTRCNVQACPGGPQRARGSVIGNINDVEFGIAFLNATITDSPNSDTRIIRAKITNVPRSLGSAMRKIVSILNPIYWTTAKEIGEAVNGFTLTNAVFKRETQVEFATGEILQMSHIARGLDSDGSLLLDIVVSGYVLQLQSPAEVTVKDYTEDYIQTGPGQLYAYSTRLFTIDGISIPYTWNHTVFYDQAQGRMPFLVETLHASSVESDYNQIEETLGFKIHASISKGDRSNQCPSGFTLDSVGPFCADEDECAAGNPCSHSCHNAMGTYYCSCPKGLTIAADGRTCQDIDECALGRHTCHAGQDCDNTIGSYRCVVRCGSGFRRTSDGLSCQDINECQESSPCHQRCFNAIGSFHCGCEPGYQLKGRKCMDVNECRQNVCRPDQHCKNTRGGYKCIDLCPNGMTKAENGTCIDIDECKDGTHQCRYNQICENTRGSYRCVCPRGYRSQGVGRPCMDINEXEQVPKPCAHQCSNTPGSFKCICPPGQHLLGDGKSCAGLERLPNYGTQYSSYNLARFSPVRNNYQPQQHYRQYSHLYSSYSEYRNSRTSLSRTRRTIRKTCPEALRQAMTMCRY

SEQ ID NO: 801 - protein, 97 aa, Homo sapiens
  SITE (78): Xaa equals any of the naturally occurring L-amino acids
  SITE (94): Xaa equals any of the naturally occurring L-amino acids
CGSRCQKAEQACKGMGTNEAAIIEILSGRTSVRGNKSSKSTRQRTARSWRKYFKSELSGNFREDSVGPSGPSQRVTAXGSCRRLLKGFGAQLSXFLN

SEQ ID NO: 802 - protein, 55 aa, Homo sapiens
TLWGFLSIYIIMLPGIKTVLLLPFHFCLLFIFHALLHWLGFLVYVKKRKHSVFLH

SEQ ID NO: 803 - protein, 156 aa, Homo sapiens
DPRVRCSCGEISVHCLPWVLFILDYSLGLNDLNVSPPELTVHVGDSALMGCVFQSTEDKCIFKIDWTLSPGEHAKDEYVLYYYSNLSVPIGRFQNRVHLMGDILCNDGSLLLQDVQEADQGTYICEIRLKGESQVFKKAVVLHVLPEEPKGTQMLT

SEQ ID NO: 804 - protein, 140 aa, Homo sapiens
LRLSQAQGNLSVLETRQVQLECVVLNRTSITSQLMVEWFVWKPNHPERETVARLSRDATFHYGEQAAKNNLKGRLHLESPSPGVYRLFIQNVAVQDSGTYSCHVEEWLPSPSGMWYKRAEDTAGQTALDIHATRCFPCRW

SEQ ID NO: 805 - protein, 96 aa, Homo sapiens
  SITE (20): Xaa equals any of the naturally occurring L-amino acids
  SITE (55): Xaa equals any of the naturally occurring L-amino acids
  SITE (56): Xaa equals any of the naturally occurring L-amino acids
  SITE (74): Xaa equals any of the naturally occurring L-amino acids
  SITE (90): Xaa equals any of the naturally occurring L-amino acids
LHLGPRPLLWLGPWHPCLRXATTIANRSQGSRTALIQDIERGNRGCESSRDTGPXXPLKTRSVLRGDDVLLPCXQPSNLARALWLLNGSXGLSDGQ

SEQ ID NO: 806 - protein, 194 aa, Homo sapiens; identical to SEQ ID NO: 623
  SITE (127): Xaa equals any of the naturally occurring L-amino acids
  SITE (139): Xaa equals any of the naturally occurring L-amino acids
  SITE (157): Xaa equals any of the naturally occurring L-amino acids
  SITE (163): Xaa equals any of the naturally occurring L-amino acids
  SITE (182): Xaa equals any of the naturally occurring L-amino acids

SEQ ID NO: 807 - protein, 151 aa, Homo sapiens
  SITE (134): Xaa equals any of the naturally occurring L-amino acids
FRAGNDISWKAPVATNNPAWAVQEETRDRFHLLGDPQTKNCTLSIRDARMSDAGRYFFRMEKGNIKWNYKYDQLSVNVTAPAPRHQPHLSGDLAWGRRDHEQDHPTQCVLPSSELDCDCLPRRRAQHPQLWGNXFISFSPRGASLCAWSVC

SEQ ID NO: 808 - protein, 110 aa, Homo sapiens
  SITE (18): Xaa equals any of the naturally occurring L-amino acids
  SITE (86): Xaa equals any of the naturally occurring L-amino acids
  SITE (93): Xaa equals any of the naturally occurring L-amino acids
  SITE (109): Xaa equals any of the naturally occurring L-amino acids
AAGGSPRPSLLASESLAXPMLSGRLVLGLVSMAGRVCLCQGSAGSGAIGPVEAAIRTKLEEALSPEVLELRNESGGHAVPPGSETXFRVAVVXFRFEGLSPLQRQRLVXA

SEQ ID NO: 809 - protein, 158 aa, Homo sapiens
  SITE (69): Xaa equals any of the naturally occurring L-amino acids
LTVSGPSTVMGAVGESLSVQCRYEEKYKTFNKYWCRQPCLPIWHEMVETGGSEGVVRSDQVIITDHPGXLTFTVTLENLTADDAGKYRCGIATILQEDGLSGFLPDPFFQVQVLVSSASSTENSVKTPASPTRPSQCQGSLPSSTCFLLLPLLKVPLL

SEQ ID NO: 810 - protein, 345 aa, Homo sapiens
GTSRADLPRPEVAPLRGLPRPKFSAPRGLRAPRSPRPEVSARTMRLGSPGLLFLLFSSLRADTQEKEVRAMVGSDVELSCACPEGSRFDLNDVYVYWQTSESKTVVTYHIPQNSSLENVDSRYRNRALMSPAGMLRGDFSLRLFNVTPQDEQKFHCLVLSQSLGFQEVLSIEVTLHVAANFSVPVVSAPHSPSQDELTFTCTSINGYPRPNVYWINKTDNSLLDQALQNDTVFLNMRGLYDVVSVLRIARTPSVNIGCCIENVLLQQNLTVGSQTGNDIGERDKITENPVSTGEKNAATWSILAVLCLLVVVAVAIGWVCRDRCLQHSYAGAWAVSPETELTGHV

SEQ ID NO: 811 - protein, 86 aa, Homo sapiens
DRRVFGLKRRLGVRSSRTASVLAGVTRGCLQGTRSQELFCPERSNLASGRKPQDPLMCVPTSVVSPSTPEEPPEVPLGFKGPSGHN

SEQ ID NO: 812 - protein, 344 aa, Homo sapiens
  SITE (170): Xaa equals any of the naturally occurring L-amino acids
QSRADLPRPEVAPLRGLPRPKFSAPRGLRAPRSPRPEVSARTMRLGSPGLLFLLFSSLRADTQEKEVRAMVGSDVELSCACPEGSRFDLNDVYVYWQTSESKTVVTYHIPQNSSLENVDSRYRNRALMSPAGMLRGDFSLRLFNVTPQDEQKFHCLVLSQSLGFQEVLSXEVTLHVAANFSVPVVSAPHSPSQDELTFTCTSINGYPRPNVYWINKTDNSLLDQALQNDTVFLNMRGLYDVVSVLRIARTPSVNIGCCIENVLLQQNLTVGSQTGNDIGERDKITENPVSTGEKNAATWSILAVLCLLVVVAVAIGWVCRDRCLQHSYAGAWAVSPETELTGHV

SEQ ID NO: 813 - protein, 173 aa, Homo sapiens
  SITE (39): Xaa equals any of the naturally occurring L-amino acids
  SITE (41): Xaa equals any of the naturally occurring L-amino acids
  SITE (68): Xaa equals any of the naturally occurring L-amino acids
  SITE (104): Xaa equals any of the naturally occurring L-amino acids
QTYYRLDISPSQQQPHSINISLSVFPVPNHSRHISGSDXWXGNVYKGDASISISNPTIKDNGTFSCAXKNPPDVHHNIPMTELTVTERGFGTMLSSVALLSILXFVPSAVVVALLLVRMGRKAAGLKKRSRSGYKKSSIEVSDDTDQEEEEACMARLCVRCAECLDSDYEETY

SEQ ID NO: 814 - protein, 106 aa, Homo sapiens
  SITE (80): Xaa equals any of the naturally occurring L-amino acids
NLEGKLTSSSSSKIMARDLVMFRDVAVDFSQEEWECLNSYQRNLYRDVILENYSNLVSLGCSISKPDVITLLEQGKEPWXVVRDEKRRWTLGPTFKYHHLGIRVST

SEQ ID NO: 815 - protein, 125 aa, Homo sapiens
VRGLVRPDQPRGGPPPGRRASHGADKPYTCPECGKGFSKTSHLTKHQRTHTGERPYKCLVCGKGFSDRSNFSTHQRVHTGEKPYPCPECGKRFSQSSSLVIHRRTHSGERPYACTQCGKRFNNSS

SEQ ID NO: 816 - protein, 497 aa, Homo sapiens
  SITE (495): Xaa equals any of the naturally occurring L-amino acids
  SITE (497): Xaa equals any of the naturally occurring L-amino acids
ARGVPVECPQPEKIPNGIIDVQGLAYLSTALYTCKPGFELVGNTTTLCGENGHWLGGKPTCKAIECLKPKEILNGKFSYTDLHYGQTVTYSCNRGFRLEGPSALTCLETGDWDVDAPSCNAIHCDSPQPIENGFVEGADYSYGAIIIYSCFPGFQVAGHAMQTCEESGWSSSIPTCMPIDCGLPPHIDFGDCTKLKDDQGYFEQEDDMMEVPYVTPHPPYHLGAVAKTWENTKESPATHSSNFLYGTMVSYTCNPGYELLGNPVLICQEDGTWNGSAPSCISIECDLPTAPENGFLRFTETSMGSAVQYSCKPGHILAGSDLRLCLENRKWSGASPRCEAISCKKPNPVMNGSIKGSNYTYLSTLYYECDPGYVLNGTERRTCQDDKNWDEDEPICIPVDCSSPPVSANGQVRGDEYTFQKEIEYTCNEGFLLEGARSRVCLANGSWSGATPDCVPVRCATPPQLANGVTEGLDYGFMKEVTFHCHEGYILHGAXKX

SEQ ID NO: 817 - protein, 159 aa, Homo sapiens
  SITE (121): Xaa equals any of the naturally occurring L-amino acids
  SITE (139): Xaa equals any of the naturally occurring L-amino acids
  SITE (146): Xaa equals any of the naturally occurring L-amino acids
  SITE (149): Xaa equals any of the naturally occurring L-amino acids
PTHSARRGTYKCIATNKTGQNSFSLELSVVAKEVKKAPVILEKLQNCGVPEGHPVRLECRVIGMPPPVFYWKKDNETIPCTRERISMHQDTTGYACLLIQPAKKSDAGWYTLSAKNEAGIXSCTARLDIYAQWHHQIPXPCLPAQXQSXRISNSKGLDI

SEQ ID NO: 818 - protein, 164 aa, Homo sapiens
  SITE (122): Xaa equals any of the naturally occurring L-amino acids
ARVKEFLDSLASKGPEALQEFQQTATTTMVYQQGGNCIYTDSTEVAGSLLELACPVTTSVQPQTQQEQQIQVQQPQQVQVQVQVQQSPQQVSAQLSPQLTVHQPTEQPIQVQVQIQGQAPQXAAPSIQNPVSDRVPVPRQLQQLQNPGGSTCKQPSRSRLQKSR

SEQ ID NO: 819 - protein, 722 aa, Homo sapiens
  SITE (237): Xaa equals any of the naturally occurring L-amino acids
  SITE (296): Xaa equals any of the naturally occurring L-amino acids
  SITE (719): Xaa equals any of the naturally occurring L-amino acids
  SITE (720): Xaa equals any of the naturally occurring L-amino acids
  SITE (721): Xaa equals any of the naturally occurring L-amino acids
VKTIELEGGLLEDHFETTVKMSTYLVAYIVCDFHSLSGFTSSGVKVSIYASPDKRNQTHYALQASLKLLDFYEKYFDIYYPLSKLDLIAIPDFAPGAMENWGLITYRETSLLFDPKTSSASDKLWVTRVIAHELAHQWFGNLVTMEWWNDIWLKEGFAKYMELIAVNATYPELQFDDYFLNVCFEVITKDSLNSSRPISKPAETPTQIQEMFDEVSYNKGACILNMLKDFLGEEKFXKGIIQYLKKFSYRNAKNDDLWSSLSNSCLESDFTSGGVCHSDPKMTSNMLAFLGENAEXKEMMTTWTLQKGIPLLVVKQDGCSLRLQQERFLQGVFQEDPEWRALQERYLWHIPLTYSTSSSNVIHRHILKSKTDTLDLPEKTSWVKFNVDSNGYYIVHYEGHGWDQLITQLNQNHTLLRPKDRVGLIHDVFQLVGAGRLTLDKALDMTYYLQHETSSPALLEGLSYLESFYHMMDRRNISDISENLKRYLLQYFKPVIDRQSWSDKGSVWDRMLRSALLKLACDLNHAPCIQKAAELFSQWMESSGKLNIPTDVLKIVYSVGAQTTAGWNYLLEQYELSMSSAEQNKILYALSTSKHQEKLLKLIELGMEGKVIKTQNLAALLHAIARRPKGQQLAWDFVRENWTHLLKKFDLGSYDIRMIISGTTAHFSSKDKLQEVKLFFESLEAQGSHLDIFQTVLETITKNIKWLEKNLPTLRTWLXXXT

SEQ ID NO: 820 - protein, 291 aa, Homo sapiens
SPARLPFFPAEGGPGRSRWREGGYLSQSRSGRLSQEEAAARSAGGMAGAPDERRRGPAAGEQLQQQHVSCQVFPERLAQGNPQQGFFSSFFTSNQKCQLRLLKTLETNPYVKLLLDAMKHSGCAVNKDRHFSCEDCNGNVSGGFDASTSQIVLCQNNIHNQAHMNRVVTHELIHAFDHCRAHVDWFTNIRHLACSEVRAANLSGDCSLVNEIFRLHFGLKQHHQTCVRDRATLSILAVRNISKEVAKKAVDEVFESCFNDHEPFGRIPHNKTYARYAHRDFENRDRYYSNI

SEQ ID NO: 821 - protein, 100 aa, Homo sapiens
GPVAPRASSQILCLSVHHEMGGGEKAVRCLPDLTGLPKGAGTLGGLTAAGPHVKGQVRRRSSPTSGPRHPGVLVCQTGCPRAPPSPGGLGAVPRPPHPFL

SEQ ID NO: 822 - protein, 183 aa, Homo sapiens
  SITE (136): Xaa equals any of the naturally occurring L-amino acids
  SITE (175): Xaa equals any of the naturally occurring L-amino acids
  SITE (178): Xaa equals any of the naturally occurring L-amino acids
  SITE (179): Xaa equals any of the naturally occurring L-amino acids
FRGLTNLVRLNLSGNLFSSLSQGTFDYLASLRSLEFQTEYLLCDCNILWMHRWVKEKNITVRDTRCVYPKSLQAQPVTGVKQELLTCDPPLELPSFYMTPSHRQVVFEGDSLPFQCMASYIDQDMQVLWYQDGRIXETDESQGIFVEKNMIHNCSLIASALTISNIQAGSTGNWXCMXXPTWE

SEQ ID NO: 823 - protein, 92 aa, Homo sapiens
  SITE (3): Xaa equals any of the naturally occurring L-amino acids
  SITE (4): Xaa equals any of the naturally occurring L-amino acids
ARXXYVFQVQAMNSAGLGQPSMPTDPVLLEDKPGAHEIEVGVDEEGFIYLAFEAPEAPDSSEFQWSKDYKGPLDPQRVKIEDKVNKSKVILK

SEQ ID NO: 824 - protein, 173 aa, Homo sapiens
  SITE (154): Xaa equals any of the naturally occurring L-amino acids
MPQPGPPYDVRASEVRATSLVLQWEPPLYMGAGPVTGYHVSFQEEGSEQWKPVTPGPISGTHLRVSDLQPGKSYVFQVQAMNSAGLGQPSMPTDPVLLEDKPGAHEIEVGVDEEGFIYLAFEAPEAPDSSEFQWSKDYKGPLDPQRVKIEDKVXKSKVILKEPASRIWAPTQS

SEQ ID NO: 825 - protein, 90 aa, Homo sapiens
  SITE (90): Xaa equals any of the naturally occurring L-amino acids
NIGIKHIPATQCGIWVRTSNGGHFASPNYPDSYPPNKECIYILEAAPRQRIELTFDEHYYIEPSFECRFDHLEVRDGPFGFSPLIDRYCX

SEQ ID NO: 826 - protein, 124 aa, Homo sapiens
GSTHASGSPPLPTPALRWTKDFVPLGNGPTLSLSSLTFDSAGTYVCEASMPTVPLLSRTQSFKLLVQGPPQLSAEETQPQTEGGWREGDEVRLVCSARGYPEPKLSWSQLGGSPAEPASLGRAG

SEQ ID NO: 827 - protein, 201 aa, Homo sapiens
  SITE (182): Xaa equals any of the naturally occurring L-amino acids
CELKYGGFVVRRTTELTVTAPLTDKPPKLLYPMESKLTIQETQLGDSANLTCRAFFGYSGDVSPLIYWMKGEKFIEDLDENRVWESDIRILKEHLGEQEVSISLIVDSVEEGDLGNYSCYVENGNGRRHASVLLHKRELMYTVELAGGLGAILLLLVCLVTIYKCYKIEIMLFYRNHFGAEXLDGDNKDYDAYLSYTKSGS

SEQ ID NO: 828 - protein, 203 aa, Homo sapiens
  SITE (7): Xaa equals any of the naturally occurring L-amino acids
  SITE (60): Xaa equals any of the naturally occurring L-amino acids
  SITE (179): Xaa equals any of the naturally occurring L-amino acids
  SITE (183): Xaa equals any of the naturally occurring L-amino acids
RPRCWRXPAPEVCAALNVTVSPGPVVDYLEGENATLLCHVSQKRRKDSLLAVRWFFAHSXDSQEALMVKMTKLRVVQYYGNFSRSAKRRRLRLLEEQRGALYRLSVLTLQPSDQGHYVCRVQEISRHRNKWTAWSNGSSATEMRVISLKASEESSFEKTKETWAFFEDLYVYAVLVCCXGILXFCSSCWSSSGSLCLTSGNPE

SEQ ID NO: 829 - protein, 122 aa, Homo sapiens
EVLTHPFPKEHRCWPSEDTLERMGLFTVCQAQSPLIQPLRVSAARCPQGRRVGSTRQAGKCVLKTLLLPSALPIATLCVNSNGFEWGSGCMGKLLCGPLGHRNLGLTGRGSILKAPSCQLCY

SEQ ID NO: 830 - protein, 281 aa, Homo sapiens
  SITE (6): Xaa equals any of the naturally occurring L-amino acids
  SITE (10): Xaa equals any of the naturally occurring L-amino acids
RHAQSXPLVXWQELEMSGNHFPEIRPGSFHGLSSLKKLWVMNSQVSLIERNAFDGLASLVELNLAHNNLSSLPHDLFTPLRYLVELHLHHNPWNCDCDILWLAWWLREYIPTNSTCCGRCHAPMHMRGRYLVEVDQASFQCSAPFIMDAPRDLNISEGRMAELKCRTPPMSSVKWLLPNGTVLSHASRHPRISVLNDGTLNFSHVLLSDTGVYTCMVTNVAGNSNASAYLNVSTAELNTSNYSFFTTVTVETTEISPEDTTRKYKPVPTTSTGYQPAYTTS

SEQ ID NO: 831 - protein, 192 aa, Homo sapiens
GRLELSASAFDDGNFSLLIRAVEETDAGLYTCNLHHHYCHLYESLAVRLEVTDGPPATPAYWDGEKEVLAVARGAPALLTCVNRGHVWTDRHVEEAQQVVHWDRQPPGVPHDRADRLLDLYASGERRAYGPLFLRDRVAVGADAFERGDFSLRIEPLEVADEGTYSCHLHHHYCGLHERRVFHLTVAEPHAE

SEQ ID NO: 832 - protein, 61 aa, Homo sapiens
  SITE (54): Xaa equals any of the naturally occurring L-amino acids
CILLLPSQDLAAIPDFQSGAMENWGLTTYRESALLFDAEKSSASSKLGITMTVXHELAHQV

SEQ ID NO: 833 - protein, 244 aa, Homo sapiens
  SITE (230): Xaa equals any of the naturally occurring L-amino acids
  SITE (240): Xaa equals any of the naturally occurring L-amino acids
  SITE (243): Xaa equals any of the naturally occurring L-amino acids
  SITE (244): Xaa equals any of the naturally occurring L-amino acids
TTSSRSFKHSRSAAVTSEFHLVPSRSMNGQPLTCVVSHPGLLQDQRITHILHVSFLAEASVRGLEDQNLWHIGREGAMLKCLSEGQPPPSYNWTRLDGPLPSGVRVDGDTLGFPPLTTEHSGIYVCHVSNEFSSRDSQVTVDVLDPQEDSGKQVDLVSASVVVVGVIAALLFCLLVVVVVLMSRYHRRKAQQMTQKYEEELTLTRENSIRRLHSHHTDPRSQPEESVGLXAEGHPDSLKXNNXX

SEQ ID NO: 834 - protein, 181 aa, Homo sapiens
  SITE (175): Xaa equals any of the naturally occurring L-amino acids
  SITE (177): Xaa equals any of the naturally occurring L-amino acids
ADAREAGFQVKAYTFSEPFHLIVSYELFPAPILRAVPSAEPQAGSPMTLSCQTKLPLQRSAARLLFSFYKDGRIVQSRGLSSEFQIPTASEDHSGSYWCEAATEDNQVWKQSPQLEIRVQGASSSAAPPTLNPAPQKSAAPGTAPEEAPGPLLRATPSSEDPGFSSPLGMPDLIXIXRWAF

SEQ ID NO: 835 - protein, 132 aa, Homo sapiens
  SITE (10): Xaa equals any of the naturally occurring L-amino acids
  SITE (32): Xaa equals any of the naturally occurring L-amino acids
SSAVTSTGGXRAPSPVSALSVSAQPQSDTRAXFHPLWCEAQRGQHLEELCSLHTYHDLPGLGSGKTSHSWLDREKCKQFVEQHTPQLLTLVPRGWDAHTTCQAPCTQRLDFTATCNSKFRRIKNGNIQNSKR

SEQ ID NO: 836 - protein, 197 aa, Homo sapiens
TRQAAKEKADAIYDMIGFPDFILEPKELDDVYDGYEISEDSFFQNMLNLYNFSAKVMADQLRKPPSRDQWSMTPQTVNAYYLPTKNEIVFPAGILQAPFYARNHPKALNFGGIGVVMGHELTHAFDDQGREYDKEGNLRPWWQNESLAAFRNHTACMEEQYNQYQVNGERLNGRQTLGENIADNGGLKLPTMLTKHG

SEQ ID NO: 837 - protein, 153 aa, Homo sapiens
  SITE (16): Xaa equals any of the naturally occurring L-amino acids
GKCKKNYQGRPWSPGXYLPIPKGTANTCIPSISSIGTNVCDNELLHCQNGGTCHNNVRCLCPAAYTGILCEKLRCEEAGSCGSDSGQGAPPHGSPALLLLTTLLGTAAPWCSRCHLQPHRTGLCRGEADTTQTFATNIGNTHIQTPPLRQCTN

SEQ ID NO: 838 - protein, 259 aa, Homo sapiens
  SITE (191): Xaa equals any of the naturally occurring L-amino acids
  SITE (205): Xaa equals any of the naturally occurring L-amino acids
  SITE (226): Xaa equals any of the naturally occurring L-amino acids
  SITE (258): Xaa equals any of the naturally occurring L-amino acids
NSRVDPRVRPLLLLSLHGVAASLEVSESPGSIQVARGQTAVLPCTFTTSAALINLNVIWMVTPLSNANQPEQVILYQGGQMFDGAPRFHGRVGFTGTMPATNVSIFINNTQLSDTGTYQCLVNNLPDIGGRNIGVTGLTVLVPPSAPHCQIQGSQDIGSDVILLCSSEEGIPRPTYLWEKLDNTLKLPQQXLRTRSREQSPSGTXVPCLQVCTKCVASNAIGTSTXLLDLQVISPQPRNIGLIAGAIALVQLLSFFAXH

SEQ ID NO: 839 - protein, 149 aa, Homo sapiens
NNSGVMPEMPEDMEQEEVNIPNRRVLVTGATGLLGRAVHKEFQQNNWHAVGCGFRRARPKFEQVNLLDSNAVHHIIHDFQPHVIVHCAAERRPDVVENQPDAASQLNVDASGNLAKEAAAVGAFLIYISSDYVFDGTNPPYREEDYQLP

SEQ ID NO: 840 - protein, 258 aa, Homo sapiens
PPIMPGWLTLPTLCRFLLWAFTIFHKAQGDPASHPGPHYLLPPIHEVIHSHRGATATLPCVLGTTPPSYKVRWSKVEPGELRETLILITNGLHARGYGPLGGRARMRRGHRLDASLVIAGVRLEDEGRYRCELINGIEDESVALTLSLEGVVFPYQPSRGRYQFNYYEAKQACEEQDGRLATYSQLYQAWTEGLDWCNAGWLLEGSVRYPVLTARAPCGGRGRPGIRSYGPRDRMRDRYDAFCFTSALAGQVFFVPGG

SEQ ID NO: 841 - protein, 288 aa, Homo sapiens
PTRPARQVGLRRCLQAASGPEAPARARVHLQSQDTAAATMATPGLQQHQQPPGPGRHRWPPPPGGAAPAPVRGMTDSPPPAVGCVLSGLTGTLSPSRSCSVCTSPSSPPATGTGPAAPTAICQPPCRNGGSCVQPGRCRCPAGWRGDTCQSDVDECSARRGGCPQRCVNTAGSYWCQCWEGHSLSADGTLCVPKGGPPRVAPNPTGVDSAMKEEVQRLQSRVDLLEEKLQLVLAPLHSLASQALEHGLPDPGSLLVHSFQQLGRIDSLSEQISFLEEQLGSCSCKKDS

SEQ ID NO: 842 - protein, 140 aa, Homo sapiens
  SITE (131): Xaa equals any of the naturally occurring L-amino acids
NSALRHSRELPGLAGVGYPYHRNAGTIASSRPLLSAEPLWSCDSENQNFLCLLLAASLFSCVKPSRTPAPHCICSSRSASSWPTSSSSWGLIELNPRCCAPSSPVLCISLPGRLHLDAAGGCAPLPHCTEXDSGQLLKHQ

SEQ ID NO: 843 - protein, 85 aa, Homo sapiens
RMKLRKREFIKHIILGEEVINLYFPSCLFSTIGSQQMCGKGGMCASWKRSRLSLKVLKGSVGRTHVLSKAIDDDQVRVILLAEHP

SEQ ID NO: 844 - protein, 363 aa, Homo sapiens
  SITE (256): Xaa equals any of the naturally occurring L-amino acids
  SITE (343): Xaa equals any of the naturally occurring L-amino acids
  SITE (344): Xaa equals any of the naturally occurring L-amino acids
  SITE (347): Xaa equals any of the naturally occurring L-amino acids
PYGTVESFQGWLAWDTRTTEMQGPLLLPGLCFLLSLFGAVTQKTKTSCAKCPPNASCVNNTHCTCNHGYTSGSGQKLFTFPLETCNDINECTPPYSVYCGFNAVCYNVEGSFYCQCVPGYRLHSGNEQFSNSNENTCQDTTSSKTTQGRKELQKIVDKFESLLTNQTLWRTEGRQEISSTATTILRDVESKVLETALKDPEQKVLKIQNDSVAIETQAITDNCSEERKTFNLNVQMNSMDIRCSDIIQGDTQGPSXIAFISYSSLGNIINATFFEEMDKKDQVYLNSQVVSAAIGPKRNVSLSKSVTLTFQHVKMTPSTKKVFCVYWKSTGQGSQWSRDGCFXXHVXKSHTMCNCSHLSSFAA

SEQ ID NO: 845 - protein, 115 aa, Homo sapiens [sequence omitted]

SEQ ID NO: 846 - protein, 357 aa, Homo sapiens
  SITE (99): Xaa equals any of the naturally occurring L-amino acids
  SITE (237): Xaa equals any of the naturally occurring L-amino acids
  SITE (239): Xaa equals any of the naturally occurring L-amino acids
  SITE (290): Xaa equals any of the naturally occurring L-amino acids
  SITE (357): Xaa equals any of the naturally occurring L-amino acids
LLFNNRLVHLDEHAFHGLRALSHLYLGCNELASFSFDHLHGLSATHLLTLDLSSNRLGHISVPELAALPAFLKNGLYLHNNPLPCDCRLYHLLQRWHQXGLSAVRDFAREYVCLAFKVPASRVRFFQHSRVFENCSSAPALGLERPEEHLYALVGRSLRLYCNTSVPAMRIAWVSPQQELLRAPGSRDGSIAVLADGSLAIGNVQEQHAGLFVCLATGPRLHHNQTHEYNVSVHFPXPXPEAFNTGFTTLLGCAVGLVLVLLYLFAPPCRCCRRACRCRRWPQTPSPLQXLSAQSSVLSTTPPDAPSRKASVHKHVVFLEPGRRGLNGRVQLAVAEEFDLYNPGGLQLKAGSESAAX

SEQ ID NO: 847 - protein, 179 aa, Homo sapiens
  SITE (6): Xaa equals any of the naturally occurring L-amino acids
  SITE (164): Xaa equals any of the naturally occurring L-amino acids
  SITE (178): Xaa equals any of the naturally occurring L-amino acids
WIPRAXGIRHEGNWGCYTEQQRCDGYWHCPNGRDETNCTMCQKEEFPCSRNGVCYPRSDRCNYQNHCPNGSDEKNCFFCQPGNFHCKNNRCVFESWVCDSQDDCGDGSDEENCPVIVPTRVITAAVIGSLICGLLLVIALGCTCKLYSLRMFERRSFETQLSRXEAELVRRELLPRMXN

SEQ ID NO: 848 - protein, 224 aa, Homo sapiens
  SITE (173): Xaa equals any of the naturally occurring L-amino acids
GKLVRLQVPVRNSRVDPRVRFDGSTSVAQCKNRQCGGELGEFTGYIESPNYPGNYPAGVECIWNINPPPKRKILIVVPEIFLPSEDECGDVLVMRKNSSPSSITTYETCQTYERPIAFTARSRKLWINFKTSEANSARGFQIPYVTYDEDYEQLVEDIVRDGRLYASENHQEXLKDKKLIKAFFEVLAHPQNYFKYTEKHKEMLPKSFIKLLRSKVSSFLRPYK

SEQ ID NO: 849 - protein, 163 aa, Homo sapiens
  SITE (69): Xaa equals any of the naturally occurring L-amino acids
ADIHFLEPLESGRPTRLSCSLPGSCEAGPPLTFSWTGNALSPLDPETTRSSELTLTPRPEDHGTNLTCXVKRQGAQVTTERTVQLNVSYAPQNLAISIFFRNGTGTALRILSNGMSVPIQEGQSLFLACTVDSNPPASLSWFREGKALNPSQTSMSGTLELLT

SEQ ID NO: 850 - protein, 199 aa, Homo sapiens
HERGPCHTYKVQRLNESTSYKFCIQACNEAGEGPLSQEYIFTTPKSVPAALKAPKIEKVNDHICEITWECLQPMKGDPVIYSLQVMLGKDSEFKQIYKGPDSSFRYSSLQLNCEYRFRVCAIRQCQDSLGHQDLVGPYSTTVLFISQRTEPPASTNRDTVESTRTRRALSDEQCAAVILVLFAFFSILIAFIIQYFVIK

SEQ ID NO: 851 - DNA, 12477 bp, Homo sapiens
agtgatggaggagagaagatggcggaagcggagtgagtgactagatggtgactgatgtcgtaactagggggggcgagttggggcagcgacacgttcccccaggggaaagctcagggctcttttgcgggcagtgtggggaaagagagactcgagacccgtcctatcgtggaggagccggctaggcccgtgtcgcggggcgaagacgaactctagggtccagttaccctccaggcaggagcgccccttccgccatcaggtcccggatctgcgcggccctgcgcgcagggtcacccttgggactccgggagctggggttttccggggaacgagcccgggtgggctcctcaggcgctgtcattcctgcaagtgggccccgcgggcagccttgttacggctgcctgcgcaggggcccgcggaggctgggtagggcagggcgggcactgccaggcctccttcgccttcttctccttcccgccccggcgccaccccactcctcctcagcgggagaatccgacacgcggggctgcccgcttccctcgtgccggaggcatcccggcgtgggcctgagagcggcgggggctgcttgcaggtctggtgaggctgaaaacaccctgaaagaaaggtctttccctcgattctctgggtgcagcgttgctgcctcacacgcgggccacattcttgtgtgtcggtgtgacggtatgtttagttaacgactccagaacttactgtttcctgggtaggcctcttgtgcaccagaactgctggctgtattttgcaggtattagtatgcctagacggtggagttaccaaagttgttcttttgtgccaggcctcgaaatgcagtgcgatggtttggccagttccgctcaaccgatgtttagacttatgccgagaatttggattctctgtgaccatttttggttaggagttagaactgtttaccatactgtttggattggagggcatagttgagcagattaacacttttaaaaaaccagaacttaagctggccttttgcatgtcactggtacacgatacggtagtagtatgacaggcagcagttcggtaaaaagtttaccttacctaccactaatactgtataatgttgaacagttaccatatgatgctgtgatttgattggaaggcagtttggaaaaaaaaaaaaaaaacagaagcataaaaatgtatgaattatttactaatccaaaaagtaagtgaggagtcagctttcttcctgacggttttcctttcacttttcctcttattttctttttctttctttgtgacagcgtctctcactcttatctcccaggctggagtgcagtggcacgatcatagctcactgcagcctggccctcttgggctcaagcgatttccccaccttagcctctcaagttgctgggaccacagtcctgtgccaccaggcctggctaattttttatttttcatttgtagagacagggtttccctatgttgcccaggctggctttgaacgcctaagctcaagcagtcctccccctgagtggtaggatgacaggtgtgaaccgccactcaaggcccccacttttcctttttttttttttttgttcggtttttttttacatttggttcctcagagaatataaatactgtttacatacgtaatatagaacaaagaaaatttgtacttaaaaaagcaacgctatggtaatagtgtatgtgtaccaattagtgccagattcatttgttttttcatggaatagaaagtgttcttacatttttatcagtgctgctaatgtggggtgggtgggatttagtttctcagaagaaaagaccgataagaaaagggagataaaaccagtataatctcttgtgtgcttttcaccttcgaggtacatttctggcccgacaaaaactactgctcttctggtttctaacaatatggaggtccttagaattgacttaaagtgtttgaatttattcaaatacagattctgtatttagtggaattttgtaccacaacaagtaagattatagtattggagggaagaaagtctggtataaaagtgtactttactgtccatacatgaggaagtgacataatttatgttttcaaaatctggagtaattctttgtgaaaaagattttgtaagggtatgggaagttgctgtttgctgcttctctgtgttctcacagcaatctgctaataagtataactcagctattagaagtagtaaggacagcgttgtagactgattaggggaaaagccagtgtgagttaaaaaaattactttttaacattttttaaaaagaacttatttttaagcaaagtttatatggtaaactaaactaagctagttaacatgagtccctaggcattctgttctaatgtataggtaagaatgactttagtttgtaattagtgtggtcaaaagaatgtaaagaaatgttttaaaatactctgatactgcttaaatttttattttcctaggtagtttagtattctctcattacctgttttggtttaaaaaaaatctttcggtaatgcaaagataaacttttggctatgcgttatctgagttacgtattctgaatcatttgaattcaaatgtagtaggtattaactattaaatatgctccatatatgtgaagtatttttcccttctaagtgcttatagtgactgtgtgttggctgtcttttatgagagccttcctagcagtttagattactgctgattatttctttggaatgaatattctttaaagctcataagataatgcttttaccaatacaaacactttgtgtgacctgccagatttaaggaccatagtacagctatggatactgaaccaaacccgggaacatcttctgtgtcaacaacaaccagcagtaccaccaccaccaccatcaccacttcctcctctcgaatgcagcagccacagatctctgtctacagtggttcagaccgacatgctgtacaggtatttcagctgtagtgatgggtagtctaagacttaagatgtcatattactttttgcttaagctggatttatgtattgtttcatattctcaaatgtacagttagaattactaatgtttcaatcaactgtctcaatccattttgtgtggctatagcagaataccaagactgtgtaattgtaaagaaaagaaacttatttcttacatttctggaagctgggaagtctaatatgaaggagctggcatctcacgagggccgtcttattgcctcattccgtggtggaagactagagagcaagataccaaatttgcagcctcaagcccttttaaaatttcctttagtcggccgggcgcggtggctcacgcctgtaatcccagcactttgggaggccgaggcgggcggatcacgaggtcaggagatcgagaccacggtgaaaccccgtctctactaaaaatacaaaaaattagccgggcgcagtggcgggcgcctgtagtcccagctactcgggaggctgaggcaggagaatggcgtgaacccggaaggcggagcttgcagtgagcggagatcgcgccacagcactcccgcctgagcgacagaacgagactccgtctcaaaaaaaaaaaaaaaaaaaaattttcctttagtctattcatgtgggcggagtccttatggcctaatcacccttcaggggtcctacctcttaacactgttgcattggagattaagtttccaacacatacttaattgggggacacatttaaccacagcaacagccaacaaagttaattaataatcatactattggctaggcgtggtggctcacgcctgtaatcccaacactgtgggagaccaaggcagggagatagcttgagcttaggagttggagactggctgggacaacatgttgaaaccccatctctacaaaaaatacaaaaatcagcagggcatggtggcatgtgccagtggtcccagctactcaggaggctgaggtgggaggattgcttgagcccaggaggtcaaggctgcaatgagctgtgatcgcaccactgtactccagtctaggtgacagagtgagaccctgtctcaaaaaaaaaaaaaaaaaaaaaatgctgggcgtggtggctcacacttctaatcccagcgctttgggagaccaaggctggcggatcacttgaggtcaggtgtttgagaccagcctgatcaacatggtgaaaccccgtctctactaagaatacaaaaattagccaggcatggtaatgcatacctgtaatcccagctacttgggaggctgaggcaggagtatcacttgaaccctggcggcagaggttgcagtgagccaagatagcgccactgcactccagcctgggcaaaaagagtgagactccatctcaaaatatatatatatagtattgagagggcttacatttgtcagcatgtagtttataggattatgtgtaaagaaaattataaggggaaagtctctaggtgctgctacagtatgaaggcattcaacctagagccccaacatacagaatggttgtagctttattttatattggaactcaaaatatagacttagggagatctgttcaggtatgtagatatgttacgaagtttatattaaacccaggtggcctaagaaccctaagcaggaggatccattctaaataccttaggggcagagggggaagggaatattgaactaggaagtcacttagttgagaaagtaaagtttacttagttaacatttatgataatggaggttggggcaatatggtattatataaaaagggcatggaccttccactctattatactttgtttgaattccattttcattatctttaggagctatatagccttgggtatgagacataatccccttgagcctcagaaaactaaaatgagggtgagactacttctttcattaattactctgaggattaaatgaagtatctttgagattaatgaagtatctagaactgtgtaaggcacattataggtttccagtagatagtaatagctaatacttattgaataattgctacgtgccaaacatttgataaatgttacatgaattatctccattaatcattaccagccctctgtgaagtagctattattattatctccattttactgatgggaaaataaatgttttaaatcagctaaataactttcccaaactcacctagctagttctcagacttcagcccttgtgcccttaaccactctgtgaattcttattttttctattatacctgctttcttctggtagaatccttataattgcatccaccctgaaaacaactgcttgcaatatagtccttcctctgctccatttttccatggtggataccccagtataatgtctatttaactgtttttggtttaggatttagttttccaaaatcactgtggagtggaaccagccagttcaccagaaattcaaacttgaatgcagagtgaggttttaatgttttttacctttctctgaggtaagggatacagggaaaaggatttagatcttttttttttttttttttttgagaccgagtctcgctctatcgcccaggctggagtgcggtggcgtgatctaggctcactgcaacctctgcctcccaggttcaagcgattctcctgcttcagcctcctgagtagctgggactacaggcacgtgccaccacacccagctaattttttgtatttttagtagagatggggcttcaccatgttagccaggatggtctcaatctcttgagctggtaatccgcccgcctcggcctcccaaagtgctgggattataggcgtgagccactgcgcctggcccccccctttttttttttttcttctctccctctgtgttgcctaggctggagtccagtggcatgatcacaactcacgaccccctgggctcaagtgctcctcctgcttcagcctcctgagtagttgagactacaggcacatgtgactatgcttggctaatttttttattttgtagagacaggatctcactatgtcgcccaggctagtcttgaccttctggctttaagctctcctcctgccttagcctcccaaagtgctgggatgagccaccacgcctgactgataatgtgatcgcttaatataccattttgtcctctagttttcaattaagctgcatagattaataaaaaattaatagaaagatatgtagatgtagatatatctcataaatagcactgactctgtttcttatgagaccatagaattgcttctcccaaaatgaaatcaaatcaatatttattgaactacctaagtaattctttaatcttccagcttgctttttctgtcctgggaattctcttcaccctccttgggtgaataagaatttataataaataagaacaatttgctgtatctataacttgtatttactcattgctgtgagtaattgaatagtagtgaaagactgtgctgacaacagaaaaaatgagtatactctgacaaaagtatgtgtcaaatagattgttatttcagtttgattttagaatttttttccgtatacagtccagtgcttttagaattttgttatggaattagaagaacaaatagagattgatctgactaaaaaaggtatattgttataattctgaatcacttaatgctggcctatagtcccctgcaggtagaggtcaaaagctcccattgattttgtgacagaaatttgtatcaggcatagtagtctatagttggagaggtgagatattaacacatgaaaataaacaataacacacagaaatatgctgtcttgaagtttagataaaaggattcatggcattatggctcaagatgtcctgagagaccctcaagctataggattatggcactattactcccttagctctttgaaaactctggtttgatgctgcgattagggttctgtgctgtttcagagtcacagtgagcacaatgtgactttcggatttggttgtataggattgacttattctgacttaaccttttggagaaatgtaagaattttctctgattttagtagagtacttgacttttctatatttatttatgaagtttcaggctcagattttacattttactaacaaatattcacagtaattaacactttttaaggaattaagtaagaatagttttattcaatgttgaagcaaaacaaggtatttgacatttaaaaattttttaaattattgagtaattttctaaagaagaaatagctttataattttattttttatttttattttattattattatttttttgagatggggtcttgctctgtcgtctaggctggagtgcagtggcatgatctctggtcactgcagcctccacctcctgggttcaagcagttctcccacctgagcctcctgagtatctgggattacaggtgcatgccaccatgcctggccaagttttgtatttttagtagagacagggtttcactatgttggccaggctagtcttgaactcctgacctcaggtgacctgcctgccttggcctcccaaagtggtgggatcacaggcatgagccaacctgcccagctgctttgtaattttatatgattattaataatacctgctcattgtaagattttcagacatctatagaagagtatgaagtagaagctaaaaatcacctctaatctagctacccatcagtggtctttgaaagttttcctgtggattctttcaaatattttaatataaaaatggtatcttactctatatactattttgtaacccactgattttctttttgttagtaaatatagatcggtatcagcaatgtacactatagtggccagtagttacttgtggctgtttacattaaaattaaaattaattaaaattcaatttaaaattaactcaattctttagttgcactaaccacattttaagtgctcagtaggcacatgtgactagttgttactgtataggacagcactgatctacattactatttgttatggttgcatggtaaaggtattctctccacacccaagccctgaattctacgaagttttatccaaaaaggttatgccaacttgaatttttactagcaatatgggagtattggtttccccaggtagtagtagtattcttttaaatctttatccatctgaaagttggaaaacagtatcttgttctaatttgtaagtttttgactactggtgagattgaaaatcttttgaaatgcttagttggcctggcctgtcttttgcgaattgtccactgggttttgttttgttttttttttctttgagatgggagtcttgctgtgtcgcccaggctggagtgcagtggcatgatcttggctcaactgcagccttcacctcacaggttcaagcgattctcctgcctcagcctcccgagtagctggggctacaggcatgtgccaccatgcctggctaattttttgtgtttttagtagagacggggtttcaccatgttagccaggatggtcttgatctcctgaccttgtgatccgcccacctcggcctcccaaagtgctggaattaacaggcgtgagccaccgtgcccggcccactgggtagttttaatgtgtacaagttagtgatttctagtgatatgtaactaggaaagaaataatgttaataagcttgatgatattatgtattaaagcagtgaaattttaaactgccacttttttatactttgattttctgattaagataaaggttgagattatggtttgacattggttcaattgacttatcacaggtaattcaacaggcattgcatcggccccccagctcagctgctcagtaccttcagcaaatgtatgcagcccaacaacagcacttgatgctgcatactgcagctcttcagcagcagcatttaagcagctcccagcttcagagccttgctgctgttcaggtaagactaaaataagagtttatgagatcaaagtttctgttatctgtaggtagttactgaaaataaatagattgggtattatttcagagttctcagatgtcctgtggttatttttcccggaggaaatatattaataggttgccgaatagaagttaattgagaaaaaggggatatgtttttttatgttactctgtttctagcttttgtctcagtgctttttatccagattgaagaaatgctatgctagtttatgtgtataaagttctaggtacaacagtgagtacttaggcttacataaattgtatttttactaaaaataagattaaaaaaattatataagtaattatactcattaaaaaatcaaacaatattaagttgtttataagagataaagtaaagctgttccttttccctgtctatcactgtttcccgttcttcaaaggtggccacagtaacaatctaatacatatttctccagaaattttttatacaaagataggtatatccatttttctaaaatccaatcatattattcctactgataacaggatttcattattaaatgcttgtttttaaaaaagatttttgttactattgtactatttaaataaagctgtgtaagatttaatcttaaatcccctcaccagaggaggatctcaattgactgaacctgaaaaaggtttatttctgttaccaacagattctcagctgttgcttcttagtagtgtaatttttaaataacatgtttgtgatacaagttaggaaactgaaacccactcactggctcttgctgtagctctaatttctttttcataactctggagtagtgattccactttaaagatgacagagacccataaagtgaaactgacaataaagtagctaataaaataagattagtctttggatcccctgttttcaccattcagcttttccttatttaaaaaatctgtttaaccgaagcttaagccatgttgactataaaattagttgtttcatacataggccttttgacatttattgttgtggttttgtgttatcatggtaccagaaagttcttaacttcaggtttttaccgacatattctaaaagtcttactattttaggcaagtttgtccagtggaagaccatctacatctcccacaggaagtgtcacacagcagtcaagtatgtcccaaacgtctgtaagttccctaaatttttttttcctggatttaaaattttaaagaattgttttccaaaagtaaactgttgttatttatgaagctgttattataatttgttgcatgctgtttaaagtaacaattgcccagaaatagaaatgataaaattcaagaattcagaactaatgttaaacttatgaaaatctgagtcttaaaaaaatctttttgtattatttcttgtatatccatttgcactgatcatgttcagatcttatgtggtttcagctttctgtgtgtattgaaagcctaaaatatacaatgcagggatattggccatgaatttactgtgatatacaatagtatgtcatgtccttggtagacatctaagcatttctaactttgtgcaattcacattttagaaattatactttcagcttacatgagttatttgggttcaatttgcaagtatccattcaagatagggtaatttattttgagaaaggagtaaaagaaagctgattcgctatattgcacatatatattgggaaattgtgccaagtttcccaggtaaaataaatttatgggcatggtaatacttgtttagcttttaattttggtataattttaaactgcaataataataaaaaaatttctgtatctactctactcagattaatcaattattgcatattgccccattactttatcattcattcttttccactacatgtatacatatttttttctgagtcatttgtaagttgagatatgttcctttattcctaaatactttgatgtgtatttcctaagaacaaggctattgttttttgaagccacagaaaaattactaaattcaggaaatataacattgatacagtgcagttcattttcacatttcatcatttgtctcaggtttcccaacctcatcactatggacattatgagccagataattctttgttgtcaggggctatcgtgtaatttataggatgtttagcagcatccctggctactagatgccggcagcttgtggtctttctccttcctctagtgtgacaactataggtgtttcctggtggggggcaaactgcctgtagttgagaacctaataatgtcctttctagatattttttcctggtccagaatggtaatactttgatacttcataaaattggctccaatacaatatagtttgtaggttgttaaggaattgaaggttaaggaattgtgctctatttcttcagctaagggtatggtctttgctaactacatgctgtggtcagcatatagctgtggttttttttgttgtttggtttttttttctggctgttgatctgactttttttttttggcgtgggaatgtcctggagtgtgaacaagattagtttaaaaagttccctatgacttgaagatgttagattaaatgaaaaacttaaataatgtaacctagctcttaagcattaatactggagtttttgtcattgacatcagatgtctttaatacaatggtaattaaggaaaggagtggtaaatattttgtgggctactgaaggaaattatatagacaaattctttattctgtgaaatactggaataacaataggatgtatttgtatagatatgttattttgaatttttttccttcatgttattaaaaggtatctttttaaactgtctttcattatggctttatgtatgtgacattcacagaagttagaattctagtgattgtgcttatatatatgacattgttaatgttacttgtcataaaccagcagcattataccatgaagtatgccaaaagctgtaaatggctggtgggggaagataagtaagtaggaagaacagattcccagtaaaataaaggaataatacattacatttgctttatttactatccgttgtgagcttctgctcaagtaatttgactagcagtaaaaattacaatgcccaaggtaacttagtaaatttaggtcaatatccaaaaacgggggggagcatggtaacagatctcttaagtagtgatgataatgagccatcaggtaacagactagtagttttcagagttttgattattttgagttaggtttccagataacagtgaagccgtgggaaagggtccattctccagaagaaaaaacagctgtcaggtaaccagctaggtagttggggcttagagtaggagtgggatcccaatggggaaatggaatattattttaaaaatcaagtccaaagtccagtcataccacctgggggaactgtgtacctactgattgattattcctaatatgaaaacccgaaatgctctaaaatctgaaatttttgcacaccaacatgacattcaaaggaggagtgttcattggaacattttggattttggatttttagatttggcatgctaaaccagtttgtatctttccaaaatctgaaaaaaaaaaa

SEQ ID NO: 852 - DNA, 169 bp, Homo sapiens
ttttttttttttttgagacggagtctcgctctgtctcccaggctggagtgcagtggcgtgatctcggctcaccgcaagctccgcctcccgagttcacgccattctcctgcatcagcctcctgagtagctgggactacaggcgcccgccaccgcaccctgctaatttttt

SEQ ID NO: 853 - DNA, 4423 bp, Homo sapiens
ggaaccaaattctgccaccagcacaacaattgcagtttactggagcatgaacaaggaagatgtcattgattcatttcaggtttactgcatggaggagccacaagatgatcaagaagtaaatggtaggattgctaacacaaatacaaatgcatatgcatattcatgcatcttcatgtgaagtatttaaatatacacctgtattatgactcttcccacaaagcagtttatagccatttacaaaacaacaacaaaaccccaacaaccatataatgaaataataactacagaagcaaaatttgggaatcaagatcagggaaaacaaaatggcataaatattataatagtcaacacaaatattgtaattgagattcacatttggctttgagctctcagaataacaggagcaatgaagtggttctcatttagagaaaggaggtaacataccagagtttcaaggaaaataaagtttttaacagtacgaaagcctgaaagacaagtgtcacgtgttccacttttagggaagaagccatagagaggacagtgtgctccacaatgacctgaatgcaaatgaagcatgggatgtcatgggtggcagtttctcaggtctgtctttgctaaaagccaccaacaagccacaagattcattcagtgttcacagttcccagggcgtgggcctaggtatggtgtagtcttcctgtgtcccaaattaatgtgtggatagaaatgaaagtgcttagtagggtgaatggatggtatgtcttacagctgagcctctgtaagtatctctcagctcagaaggacttctaataagccctggaagccaggcagtttgaggttgtgcttcctgatgaatcagagctgggagtgctgccattctgtgttgcttgttgaagacagacccacatactatggaaaacagatgagcatgtggcaggcttggcgtcctaactcaggtgcccaatttgtaatcaggaatgaatggtaatatattatactattactaatatttaagtcttttgaaatgtcatgtgataattaatttagaaaaaagtttaaaaaagcaattataggcatggtgtaaagttggctaaatctgtctgtaatgtcatgactcctgttttattgacctatttccatatgcctgtcacagcacaaccaagtaagtgttactatccctatttgcaagtgagaaaactaatgtgaggttacatagtttgctcaaggccttgcaacttgtacatgaccgggggcaggagtcaaacacacatctttcaggctccaaagtttattcttttgtttgtttgtctctgtgtgtgttttgttacaccatacttcatctccatctatttctagctctatttcatggctctctgagacccttcttatcaaaagaaaattgttgcttggcctgcttttttttttttttactgggtttcacccccaccccaaacacttccctatcctgtgtctcattgtttctgtgccctgaactgtgttaataacagttagctaatctgataatctagtctgtgataccatgtcatgtttagtagggtctctagtcacatatgttatgtacactgttaaagggagtgccagggtaataggatgtattagttcattctcacactgctataaagacatacctgagactgggtaatttatgaagaagaggtttaactggctcacagttccacaaggtgtacaggaagcatggcagaggaggccttaggagacagaatcatggcagaaggtgaaggggaagcaagcacatcttcccatggctggcagggaagagagagagagtaaagcaggaagtgctacacactttcaaacaaccagatctcttgagaactcatttatgagaacagcaagggagaagtccacccccatgattcaatcacctcctaccaggctcttcctccaacactgggaattacaattcaacatgagatctgggtggggacacagaaccaaaccatatcataggaccttgcctaaaagaatgattccagtgaaaattgcagacacagattctgggatatgggagaaatattcttcagtgtacaggtccttatgaggttctttaaactgaactttctgtccagaaagtacagctcattggaaaggagagaggcaattgagaagcctgctaagttgaagagctcccgattttcttttaaagaaacagtctgggttcttaagtggaaaagttttgaagatgtgacattcaagagtcataagggggggaaactgaaattaccataggcaaaatttacaaagaaaatcatatgttttaaaggagataaaatttcagtgagaataatcaaattggcccaaattggtaggtttgttcagaatggtattggataatgtttactattaaaatattcaaagtaagatattttttaaaatttttgaaggcaaatgtcttaattggacaaagttacttcttagagtagcttatgacctatcaaagttatttaagtatttctataaattgtggaaatccctagtggaaagaattctggaattcatgagaagaaaccaggatttgaaacctggaaggtcatactgaataccaaaatagtttactaatctgtaaagatgtttaaaaaccatgaagttgtcctttttttatgacatactcttctgaaatattggcactggttcttaagattttcttgagaatgtgttactgagatttaagctaacatatacattatgtaattttaatattcgctactgaaataagttactttaattgtggtatatgaagctcagaatcttactaatatgctattattttctgagaagtgttaacaagtattactatgtcatcctaagtatctcttttcagaatgctgttgctttcatatgtattctaaggagctggttttcacataatggtatctgtaaggttatcagtttgcattttccactgaaagaaaatcatagatgactttctccagtaactataacttttaattaactttggaagatgtcttcgattttaattgtgtcttatgctagagttggtagaagaatacagactgacagtgaaagaaagctactgcatttttgaagatctggaacctgaccgatgctatcaagtgtgggtgatggctgtgaacttcactggatgtagcctgcccagtgaaagggccatctttaggacaggtaaggagatggatgctaagggtgcattagaagacaacgctcagttcttcacagactcttgagatcagccagtaagtgtttattaagcacctattgtgtgttgagtgttgtgcaaagtgctggttatacaacgatgacttaagcctggggtcctgttctcaagaagctcatgctcaggtggggagatggaaaaacagaggatcatagaaaatgtgtggtaagggccatatccagatatacacaggttattatgagaacactccagaggggcacccaagttggcctggggcaggggcaggatcggaactgcttcctagaactgatgcctgcagaaaatgctttaaaggatcaataggaagtaatgcgttaaaggaggatattccacttgaaaaagacatgagcagaggcatcaaggcaagaaacagtatggagtgtgcaggacactgtaagaagtttggtattatttcttagacttaaacaaaggaaagacaagataagaaaggctaacatagagaggccgtgtttgcaaggtaagaagcttgggctgcgtgtgggtgctgggaacccccaaaaggttttaagcagtggtatttaactggaaatgcattctcacgatgaaatcttttcacagggtaagaagcctaaaccaaggctgcactgcctttaagataatggtaacctgcctcaggggaagaaatagtttactcctaccctttatcctttcctcttgccttttaaaacaagcctttattgagcacctactgaggacaagatcatggctaacttgtgtgtactgggacaggggaaagaatctttattttgatttgcttgtatatgtataaagaaagtctagtgggatttttaggaagctactattaggggctgtttggggatgggtgagaactgggcaatgtggaaggcagagaagggagagagacatcaccatctatatttgatcccttttgggtttttaacacagaatacactttctgatgaaaaattgaaaacagaatcatgccgaagccgtggaagatcatgtgcttctcaggtcccaggaaagcaagctggcattgctccacgactgtcctgactctctttctgcagcaccctccacccctgtgatccgcgctgaggactgtactgtgtgttggaacacagccactatccgatggcggcccaccaccccagaggccacggagacctacactctggagtactgcagacagcactctcctgagggaga

SEQ ID NO: 854 - DNA, 10503 bp, Homo sapiens
actgcttctttagagaaaatgcctgctgcgttttcccttttcgaacattatgatgacagctcggcaagaagtgaccagatgttaaaacaagtggctggtaagcattttaatatattaattacctagatgaaatatggcagtttttgcttgtttgttttgtatgtaatgatatatacaaaagattttgagtgtaaagacatgtaactggaaaaagaaaagtattagttgtaaaatgttacagctagactctgaaattgagcatgggaggaacatcccatttctgtgcatttccatctgaagctttatgacttgcttggagattgaggaggtggaaggagccatggaaccaaagggtctcctctttttttttttctttaatttaaaaataggatttctctccctctcttctcatttgcctcataccagcagccaggtatagaagaaaaaagaagtcaaatgttttcctacgtgtcaaacagatttctctttatgagtggttttcccctcttcaattcagttcttttccccttttttcaaactaaacagatgagcttagagaactatcagctcagcaccatggtctgtagccaggagcctcccactcggctgtcagaagcatcctgccagctcttcacaatattttttaatgtgctattttaacaaacaggacaatgaaacttatttagatttttcaaagctgccatgtttcagtgaagttaccaagtttttcttactgtacaacatgctcaggtgtcctccttaaaagatgctgtagtcttccaaaatcacctcaaagattacagctattcaggaggctgaggcgggaggatcacttgagcctaagggttcgaatccagcctgggcaacatagtaagacccccatgtctaaaaacaacaacaacaacaacaaaaaaccccaaaaaacaaaaacaaaaaagatggctgttgtgtttaaattgatgattaacattcattcctgtacaaagagttttaatttagtaactactaaaaaggctactgtatgtctaaaaagacaaaaacaacacgacaccacacaacacacaaaaacccaaaaccccaccagccctttataaaattaaaaactcaatcattgatcttaatggattttctctagaaatgtctcaaagtgttttcttgtaatgtctttaagagggattagactaggacagtgattgcaaactaagaaagtttgattaacagagctggtcttttgcttttaagggattcattatatgccactgttcatttaggaggatatgcttttcaatacttaatgggcaatgagaggacgtttaatatattttagaggtcacagagttaaaatgtcacaaagtgttaacaattaactcagcaagtgcacatggcggtccctgtggctggaagccttttatggagagactgatctcagagccataaatgttactttgtgcgtctgtttcacaaaattggagcccagggtgttgacttgctgctaagtagtttttgtgcatttggtgacacctctcagaagtcctcacctgtgacctgaaaagttgatctgatgaccccctacctaaactaagcagatacaatgagaaaaggatgtgagttttccaatgagaagtagcagcccatacgatttattccatgcttatacgatggctggcattgtggaaaccgttaagcatatcaaatcatctaatctcaccataacccaaggaggtaggttttgttattcccatttgacaggtgaggaaaggtgaggaaagagaggaacagaaaaatgttctattttcaagaaaacacagccggttggggtgtgtttggcaggggagtttggcttcagagtctgccccacagcgaaaaggcagagtgctgctgagaaagatgagagaaacagatcatgataaacaaacatgaatctaggcttccttgatgctggcacctggggattttttttttaattgtggtaaaatacacataacaaaatttaccatcttgcccatttttaattgtacagtttagtggcattaaggacattcacattgtggtacaaccatcactgccatcctctccagaactcttcatcttgcaaaacagaagctctatatccattaaacactaactctccatattctccccttctcctggctgtggcagccaccattttactttctgtttctgtgaatttgattactctaagtacttcatctaagtggaatcatatggtatttctctttttgtgactggtttgtttaacttagagtaatatcctcaaagcttaccatgttgtaacgtgaaacttttcctcctcttatctattcatccattggtggatacttgggttgcttccactttttggctattgtgaataatgctgctcccctgaggacgttccaaaggccaggttgagtggaaatctgtatctggtcacagattccaaagtccagtttggttaatgcttaactcccccagtgtggtggctctttttgggcacatttcatcaggcagaggggtgattcttctacccaattccttagcctcttataatgaagccctaaactttcattttggtattttttggtatcatacctttttttttttccccacacagagtctcactctgtcgcccaggctgaagtgcagtggcaccatctcggctcactgcaacctccgcctcccgggttcaagccattcttatgcctcagcctccccagtagctgggattacaggcgtgcatcaccatgcccagctaattgttgtatttttagtagacatggggttttgctgtgttggccaggttggtctcctactcctgaactcaagtgatctgccctccttggcctcccaaagtgctgggattacaggcatgagccactgcgcccggccagcatcatacttattcaagtttattactgtaaaagtgtaaacagagttgctaaactccgggtctctgatgttgttctaccacataagaattgtaaatccagccattattattagattatatctatggaatattcttattcccttttcattttagaattctttgaaaagtaaaagtatttcctgtttctgaaaaaaggtgttttacctttaatgcttttgggggaaggagcacattaaaacaaaatttctaacctacatactttgcttcttccttgaaattaagtgattttcttggatcaattaatcagtttttaagtttgttaatttacccgagaaagagagagaaatgtgaaagatgttttcatttttaaaaagcagatacagctccatgtataattcataggataaaagggggagcattttcactgttcatgcctcaagtaattctcaaatactgcttcaaagatgatcgacaatccttgaaacattctgcttggtcctttcatagacctgggtaacatgaaaatttactgaactacatttttctggacagacttatttagaatgtgacatccatttcctgctgggaagacaagcaataaattccaagacagtatcagggtctctgacccgtgatcagttcctggggaggtgctctcaccagcggcctctgccttagcatgcagttcgctcctcaggtcttacctctgtggcctctgtggctttccagatgatgggtccctccttcagccctcatcttcaggagcttcctgccttgcccctctgtttcctgtgctcctgccaaggcccctttgctttctgaatgttagcactggttatctgtcagccactttgctaagcactcgatagatattatttgcttcctataatgacactgggaggtaatactattattattgttttctcattttaaagatggggaaactgaggctgagataacagaggggatggatctggtgtttaaccttgggccagccactctgcattgaagtccatgaacttgacccttctcctcttctgcttctcgtttttcacaactgtgtattttttcagctctttatcgctgttgcatcttctcagtttgtctctttttgctacattctttagacccatttgtgtttttctcatttgtaccttcttgctgaactgatctttatttttcttttcctttggtgtccacttttaataaagtaatctcataaaatttggcccatattattaatatttcagtaaacttatctctcaggaaattgttgactggaaaaaaaacccataaaaaataaatgtaaaaacatgctattgggtcaggtgcagtggctcatgcctgtaatcccagcactttgggaggccgaggcgagcggatcacctgaggtcaaggagtttgagaccagcctggccaacacggtgaaaccccatctctactaaaaatacaaaaaaatgagctgggcgtggtagtgggcgcctgtaatcccagctactagggaggctcaggcagcagaattgattgaacccaggaggtggaggttgcagtgagctgagattgcaccactgcactccagcctgggtgacagagcaagactccatctcaaaaaaaaaaaaaaaaagcatgctattttttcaactatgggaataaccttttcctctaatttgtaaaatatgttcaaagattttatgtcataagttttgggggagaattgcatagaagtttgatttatggcattgcatataccattaatgtttgtacgcataatcatgaactttacaagtttctaggaaaacatccaaggattttgttgtcattaaaattcagaacaacggagttatactaggtgtctaaaatgtatgctgaatcagtaggctactttttctgtagtttttatatattttgtttaatttttaaaaagttagtaattaaaaaaattgatagggctagccatgttggaaagaaaaaatgggatagtcgtttcagaaagtgtattttgatattttatttttgcaagtatttttctggcttgaagatacaccaactatatcttaaaagggtttcatttgcctctatcgtgaatatagaatctatattgatacagaatgatacaaccttggctatctagcaaagcatgtgttttgttttgaaggataagcaagtcagttgttgcctcctctaacctacatgagtttattgctccaactataggactgtagaagagtattctcaagtgatcccattttggaatacatttttgtttatttctgtgtgtattatatatgtgcacatgtacaaatgcatagaaaatattgtggagggatacacattcaacagtgattgcatctaaagaatacagctgggcgcggtggctcacgcctgtaatcccagcactttgggaggctgaggcgggtggaatccttgaggccaggagttcaagaacagcctgaccaatatggtgaacccccacctctactaaaaatacaaaaattagccaggtgtggtggtgcaggcctgtaatcccagctactcaggaggctgaggcaggagaattgcttgaacccgggaggcggaggttgcagtcagccaagattgcgccactgcactccagcctgggtgataaagcaagactccatctcaacagattaaaaaaaaaaattggccggtgtggtggctcatgcctgtgatcccaacactttgggaggccgaggtgggtggatcacctgaggtcagaagttcgagaccatcctggccaaggtgatgaaaccctatctctactaaaaatacaaaaattagccaggtgtggtggcaggcgcctataatcccagcaacttgggaggctgaggcagaagaatcgcttgaatctgggaggcaaaggttgcagtgagccgagatcgtgccactgcactccagcctgggtgacagagtgagactcagtctcaaaaataaataaataaaattaaattaaagttaaaattaaaataaaataaaaaataaaaaaatataattggggttgggggtttgggggaacaagagagcccttctacttttatactatgtatttctgtattctttgaatatttttcaacaagcataagtaacttgtgcccaaaaaattaataaaaacagcattagttacaataaaacttgtttatattccagttccacagcctcctagattagaacctcaggaaccaaattctgccaccagcacaacaattgcagtttactggagcatgaacaaggaagatgtcattgattcatttcaggtttactgcatggaggagccacaagatgatcaagaagtaaatggtaggattgctaacacaaatacaaatgcatatgcatattcatgcatcttcatgtgaagtatttaaatatacacctgtattatgactcttcccacaaagcatttatagccatttacaaaacaacaacaaaaccccaacaaccatataatgaaataataactacagaagcaaaatttgggaatcaagatcagggaaaacaaaatggcataaatattataatagtcaacacaaatattgtaattgagattcacatttggctttgagctctcagaataacaggagcaatgaagtggttctcatttagagaaaggaggtaacataccagagtttcaaggaaaataaagtttttaacagtacgaaagcctgaaagacaagtgtcacgtgttccacttttagggaagaagccatagagaggacagtgtgctccacaatgacctgaatgcaaatgaagcatgggatgtcatgggtggcagtttctcaggtctgtctttgctaaaagccaccaacaagccacaagattcattcagtgttcacagttcccagggcgtgggcctaggtatggtgtagtcttcctgtgtcccaaattaatgtgtggatagaaatgaaagtgcttagtagggtgaatggatggtatgtcttacagctgagcctctgtaagtatctctcagctcagaaggacttctaataagccctggaagccaggcagtttgaggttgtgcttcctgatgaatcagagctgggagtgctgccattctgtgttgcttgttgaagacagacccacatactatggaaaacagatgagcatgtggcaggcttggcgtcctaactcaggtgcccaatttgtaatcaggaatgaatggtaatatattatactattactaatatttaagtcttttgaaatgtcatgtgataattaatttagaaaaaagtttaaaaaagcaattataggcatggtgtaaagttggctaaatctgtctgtaatgtcatgactcctgttttattgacctatttccatatgcctgtcacagcacaaccaagtaagtgttactatccctatttgcaagtgagaaaactaatgtgaggttacatagtttgctcaaggccttgcaacttgtacatgaccgggggcaggagtcaaacacacatctttcaggctccaaagtttattcttttgtttgtttgtctctgtgtgtgttttgttacaccatacttcatctccatctatttctagctctatttcatggctctctgagacccttcttatcaaatagttgttgcttggcctgctttttttttttttttactgggtttcacccccaccccaaacacttccctatcctgtgtctcattgtttctgtgccctgaactgtgttaataacagttagctaatctgataatctagtctgtgataccatgtcatgtttagtagggtctctagtcacatatgttatgtacactgttaaagggagtgccagggtaataggatgtattagttcattctcacactgctataaagacatacctgagactgggtaatttatgaagaagaggtttaactggctcacagttccacaaggtgtacaggaagcatggcagaggaggccttaggagacagaatcatggcagaaggtgaaggggaagcaagcacatcttcccatggctggcagggaagagagagagagtaaagcaggaagtgctacacactttcaaacaaccagatctcttgagaactcatttatgagaacagcaagggagaagtccacccccatgattcaatcacctcccaccaggctcttcctccaacactgggaattacaattcaacatgagatctgggtggggacacagaaccaaaccatatcataggaccttgcctaaaagaatgattccagtgaaaattgcagacacagattctgggatatgggagaaatattcttcagtgtacaggtccttatgaggttctttaaactgaactttctgtccagaaagtacagctcattggaaaggagagaggcaattgagaagcctgctaagttgaagagctcccgattttcttttaaagaaacagtctgggttcttaagtggaaaagttttgaagatgtgacattcaagagtcataagggggggaaactgaaattaccataggcaaaatttacaaagaaaatcatatgttttaaaggagataaaatttcagtgagaataatcaaattggcccaaattggtaggtttgttcagaatggtattggataatgtttactattaaaatattcaaagtaagatattttttaaaatttttgaaggcaaatgtcttaattggacaaagttacttcttagagtagcttatgacctatcaaagttatttaagtatttctataaattgtggaaatccctagtggaaagaattctggaattcatgagaagaaaccaggatttgaaacctggaaggtcatactgaataccaaaatagtttactaatctgtaaagatgtttaaaaaccatgaagttgtcctttttttatgacatactcttctgaaatattggcactggttcttaagattttcttgagaatgtgttactgagatttaagctaacatatacattatgtaattttaatattcgctactgaaataagttactttaattgtggtatatgaagctcagaatcttactaatatgctattattttctgagaagtgttaacaagtattactatgtcatcctaagtatctcttttcagaatgctgttgctttcacatgtattctaaggagctggttttcacataatggtatctgtaaggttatcagtttgcattttccactgaaagaaaatcatagatgactttctccagtaactataacttttaattaactttggaagatgtcttcgattttaattgtgtcttatgctagagttggtagaagaatacagactgacagtgaaagaaagctactgcatttttgaagatctggaacctgaccgatgctatcaagtgtgggtgatggctgtgaacttcactggatgtagcctgcccagtgaaagggccatctttaggacaggtaaggagatggatgctaagggtgcattagaagacaacgctcagttcttcacagactcttgagatcagccagtaagtgtttattaagcacctattgtgtgttgagtgttgtgcaaagtgctggttatacaacgatgacttaagcctggggtcctgttctcaagaagctcatgctcaggtggggagatggaaaaacagaggatcatagaaaatgtgtggtaagggccatatccagatatacacaggttattatgagaacactccagaggggcacccaagttggcctggggcaggggcaggatcggaactgcttcctagaactgatgcctgcagaaaatgctttaaaggatcaataggaagtaatgcgttaaaggaggatattccacttgaaaaagacatgagcagaggcatcaaggcaagaaacagtatggagtgtgcaggacactgtaagaagtttggtattatttcttagacttaaacaaaggaaagacaagataagaaaggctaacatagagaggccgtgtttgcaaggtaagaagcttgggctgcgtgtgggtgctgggaacccccaaaaggttttaagcagtggtatttaactggaaatgcattctcacgatgaaatcttttcacagggtaagaagcctaaaccaaggctgcactgcctttaagataatggtaacctgcctcaggggaagaaatagtttactcctaccctttatcctttcctcttgccttttaaaacaagcctttattgagcacctactgaggacaagatcatggctaacttgtgtgtactgggacaggggaaagaatctttattttgatttgcttgtatatgtataaagaaagtctagtgggatttataggaagctactattaggggctgtttggggatgggtgagaactgggcaatgtggaaggcagagaagggagagagacatcaccatctatatttgatcccttttgggtttttaacacagaatacactttctgatgaaaaattgaaaacagaatcatgccgaagccgtggaagatcacgtgcttctcaggtcccaggaaagcaagctggcattgctccacgactgtcctgactctctttctgcagcaccctccacccctgtgatccgcgctgaggactgtactgtgtgttggaacacagccactatccgatggcggcccaccaccccagaggccacggagacctacactctggagtactgcagacagcactctcctgagggaga

SEQ ID NO: 855 - DNA, 144 bp, Homo sapiens
aaaaaaattggccggtgtggtggctcatgcctgtgatcccaacactttgggaggccgaggtgggtggatcacctgaggtcagaagttcgagaccatcctggccaaggtgatgaaaccctatctctactaaaaatacaaaaatta

SEQ ID NO: 856 - DNA, 2396 bp, Homo sapiens
cctaactcaggaaactaatagtgagcttgtgtataatgtaaatcggaatgtctccatgatagattggtaacattaaggagctaattacatgtatattatcatggagacatacctgcctctccaaaagcatgaaatatgtaaagagattcttctaggaaaaaagaaatgtgacgctctctcaccaagatgctgaagctgacattcatcaataagcagctgtgcatccactaggcatttggtaaatgttaacttatctaccgaggtggtgttttcttagcctcccacctccttgctgtggagcagcttcatgtaccatgatgcatattcagatcattcttaatactcatattttgatagagaggtttttaggttttcttttaaaccaagtttattgagataaactactttggtaggatatggaacttaggaataatggtatgaaactagacagcttttttttttttattacactttaagttctgggatatgtgttcagaacatgcaggtttgttacataggtatacacgtgccatggtggtttgctgcacccatcaacctgtcatctgtattcggtgtttctcctaattctatccctcccctacccccctgcccccaaaaaggccccagtgtgtgatggtcccctccctgtgtccatgtgttctcattgttcaactcccacttatgagtgagaacatgaggtgtttggttttttcttcctgtgttagtttgctgagaatgatggcttccagcttcatccatgtccctgcaaaggacatgaactcagtccttttttatggctgcatagtatttcgtggtatataagtgccacattttctttatccagtctatcatttgggttggttccaaatctttgctattgtgaatagtgccgcaataaacatacgtgtgcatgtgtctttatagtagaatgacttataatcctttgggtatataccccataataggattgctgggtcaaatggtatttctggttctagatccttgaggaatcgccacactgtcttccacaatggttgaactaatttacactcccaccaacagtgtaaaagcattcctatttctccacatcctctccagcatctgttgtttcctgactttttaatgactgccattctaactggtgtgagatggtatctcattgtggttttgatttgcatttctctaatgaccagtgatgatgagctttttttcatatgtttgttggcagcataaatgtcttcttttgagaagtatctgttcatatcctttgcccactttttgatggggtttttttttcttgtaaatttgtttaagttccttgtagattctggatataagccctttgtcagatggatagattgcaaaaattttctcccattctgtaggttgcctgttcactctgatgatagtttcttttgctgtgcagatgctctttagtttaattagatcccactggtggattttggcttttgttgccattgcttttggtgttttagtcatgaagtctttgcccatgcctatgtcctgaatggtattgcctaggttttcttctagcgtttttatggttttaggtcttacgtttaagtctttaatccatcttgagttaatttttgtataaggtgtaaggaaggggtccagtttcaattgtctgcttatggctagccagtttttccaacaccatttattcaatagggaatcctttccccgttgcttgttcttgtcaggtttgtcaaagttcagctggttgtagatgtgtggcattatttctgaggcctctgttctgttttattggtctatatatctgttttggtaccagtaccatgctgttttggttactgtagccttgtagtatagtttgaagtcaggtagcatgatgcctccagctttgttctttttgcttaggattgtcttggctatgcaggctcttttttggttccatatgaaatttgaagtagttttttccaattctgtgaagaaagtcagtggtagcttggtggggatagcattgaatctgtaaattcctttgggctgtatggccattttcacaatattggttctttctatccatgagcatggaatgtttttccatttgtttgtgttctttcttatttctttgagcagtggtttgtagttctccttgaagaggtccttcatatcccttgtaagttgtattcctaggtatttaattctctttgtagcaattgggaatgggcattcactcatgatttggctctgtgtttgtctattatggttgtacaggaatgcttgtgatttttgcacattgattttgtatcctgagaatttgctgaagttgcttatcagcttaaggagattttaggctgagatgatggggttttctaaatatacaatcatgtcatctgcaaacacagacaatt

SEQ ID NO: 857 - DNA, 1684 bp, Homo sapiens
cctaactcaggaaactaatagtgagcttgtgtataatgtaaattggaatgtctccatgatagattggtaacattaaggagctaattacatgtatattatcatggagacatacctgcctctccaaaagcatgaaatatgtaaagagattcttctaggaaaaaagaaatgtgacgcactctcaccaagatgctgaagctgacattcatcaataagcagctgtgcatccactaggcatttggtaaatgttaacttatctaccgaggtggtgttttcttagcctcccacctccttgctgtggagcagcttcatgtaccatgatgcatattcagatcattcttaatactcatattttgatagagaggtttttaggttttcttttaaaccaagtttattgagataaactactttggtaggatatggaacttaggaataatggtatgaaactagacagcttttttttttttattacactttaagttctgggatatgtgttcagaacatgcaggtttgttacataggtatacacgtgccatggtggtttgctgcacccatcaacctgtcatctgtattcggtgtttctcctaattctatccctcccctacccccctgcccccaaaaaggccccagtgtgtgatggtcccctccctgtgtccatgtgttctcattgttcaactcccacttatgagtgagaacatgaggtgtttggttttttcttcctgtgttagtttgctgagaatgatggcttccagcttcatccatgtccctgcaaaggacatgaactcagtccttttttatggctgcatagtatttcgtggtatataagtgccacattttctttatccagtctatcatttgggttggttccaaatctttgctattgtgaatagtgccgcaataaacatacgtgtgcatgtgtctttatagtagaatgacttataatcctttgggtatataccccataataggattgctgggtcaaatggtatttctggttctagatccttgaggaatcgccacactgtcttccacaatggttgaactaatttacactcccaccaacagtgtaaaagcattcctatttctccacatcctctccagcatctgttgtttcctgactttttaatgactgccattctaactggtgtgagatggtatctcattgtggttttgatttgcatttctctaatgaccagtgatgatgagctttttttcatatgtttgttggcagcataaatgtcttcttttgagaagtatctgttcatatcctttgcccactttttgatggggtttttttttcttgtaaatttgtttaagttccttgtagattctggatataagccctttgtcagatggatagattgcaaaaattttctcccattctgtaggttgcctgttcactctgatgatagtttcttttgctgtgcagatgctctttagtttaattagatcccactggtggattttggcttttgttgccattgcttttggtgttttagtcatgaagtatttgcccatgcctatgtcctgaatggtattgcctaggttttcttctagcgtttttatggttttaggtcttacgtttaagtctttaatccatcttgagttaatttttgtataaggtataaggaaggggtccagtttcaattgtctgcttatggctagccagtttttccaacaccattta

SEQ ID NO: 858 - DNA, 731 bp, Homo sapiens
gtccatgatgcacacactcacacatctgaatgtgtattcggggggagcgtccatgatgcacacactcacacatctgaatgtgtattcggggggagcgtccatgatgcacacactcacacatctgaatgtgtattcggggggagcgtccatgatgcacacactcacacatctgaatgtgtattcggggggagcgtccatgatgcacacactcacacatctgaatgtgtattcggggggagcgtccatgatgcacacactcacacctgaatgtgcatttgggggagcttccacgttgcacacacacacttgaatgtgcatttggggggagcttccacgttgcacacactcacacctgaatgtgtattcggggggagtgtccatgatgcacacactcacacctgaatgtgtattcggggggagcgtccatgatgcacacactcacacatctgaatgtgcacttggggaagatttttttgaaaatcactgaacacctgaggagcaggtactgttcaggcaaacctgaggtcacccaccggaatctgtaacgcgctgaaaggttttatcagttgttattcatgagaattgttggtatctgaatcaaaaatacgttccagaagttgagattgtgttgttactgtttgaaaccgcggagaaaaggcacttcttctaagaagcaaaatagcccagcaagggcctgtctggggttaagggaggacacgctgtgggggtcc

SEQ ID NO: 859 - DNA, 410 bp, Homo sapiens
ttcattttacaaaggaactcactgccaggttctattgtaggaccttctgggtatattaatgcatgcttatgctcatagctggttatcctctgtttgccacagtccccagtcatcctctgaccttctttctgctctctgccctggagcttccattccattttggtcattgagaggcactagcaggaaagcaaaggacaggaagagacagaggctggggtatagacttttaccctcgcattgcattcccctcttggttctggctttggctgctttctatgtcagccctagctcctctgctgcagctccagctctcaccaaggtccagtaacactactgctcttctcctcctaaacttcaaggtttaatggtttcccatggttacaaacccctgggtgcagagcctctgttgg

SEQ ID NO: 860 - DNA, 329 bp, Homo sapiens
tttttcagcttttacttcagggggtacatgtgctgtttgttgcatgggtaaattgcatgtcactgggtctgatatacaaaagatttcattacctaggtagagagtatagtcaccgataggtagttttctatcttcaccctccccctacaggtagtttttctatcctcaccctcctcctaccttcccacctcaagtgaaccccagtaactattgttctcttatttgtttccatatgtactcaatgataatagctcagaaacttattcctcttgattttttttaaatagacagaagtacttggacctatgcactggagggtcctcagaaaa

SEQ ID NO: 861 - DNA, 21721 bp, Homo sapiens
gatgctgaaaaattaggattttccgagactgatagcaaggaggtaatttttttcacttgtcttttgagttgagggtaaatatattttagtaaagtatacttgctcagtcaagagtcttgtcaatgggacaaaggcaggtggatctcttttttatcccatctgatgcttctgagttgctgagttctgtgaggatctaccaaggagagtagcttctgtactcccattctagattggcagtcatctcctgcaactctagccagggccatctgcgtgttgcatctttgttggtcactgttgcaggagagttgtttaataagccatcatattttacatgtctatttgtgagactaaaaaaatcactaccttctccttgacttgtttaaataaatatcttttggagaaactaaattgagaatgtttgggtagacttttgttgtgcagtggcctgtaccagaagcagctgggtgttacccctgtgaaaggactaaccaaacagcagtgtccctcccctttaagcctcgctgagtgctggcctcctggaggggccactgtccatgttagataaagctataggttggataaatccaaaatgacagagtggaatatctcctgaaacaaaagaaacttaagtgacatttatatttctgtcatactattatgaaattaatttaaaatgttttaaatttctcactagaggcatgtcactttaaaatatctgtgttccataattttaatttttcaatattggtgaaatcattttaataactaccatgagatctaaatgaataggtaagcaaattatcattcattttaaagggctgtattccatgctcactcagtcattggacaaacacaactcattctttcagcacatactaagtgctgagcactattttaggtgttgacggttgagtggggagctctctacctcctagaacctattttcatgtgaatcctggtgagtttaaggaattaaatatgccaactaaatataacttagtttatataatatatttaattatatttatagttaaatgcaagttaaacacgtgcatcttccactctgttaatggatcattatcttctgaaggcctcatctgaaagttctggtcataaacgatcttccagttggggacgcacatactccttcacaagtgcaatgagcagagggtgtgtgacagaggaggaaaatacaaatgtgaaagccggcgtccaggctttgttgcaggtatgtggctggccaggacatgaagacccctccaccgcctacagctggagccattttgtctttttgtttattggggataatgtcatataaagtatggtggtatttgtagccatctgtcagtaaacgataaacagcaatttaattagctattacattctcattctgagttttctttctaattcctacccacaatttacaaaaatttttttctagtcaaagaagacataaaaactggttacagtctttttgagattattatatagtgaatatgaaatggctgatatttaaatctttaaattatcttccaaacacttatgagtagtaagttatctgggctctaatttgcaagacaagcttggcaattataaaatcttataagtaatattcctcttaaaattggctgtgtttacaaagaacaatgactgatgtagtttttagatttgaatgaatatatgaaatagaactgactccatttgggaacatttgaaagagcaactttggaacattacttaacctccccagagctcaggattttacctcaaaaatgggaattgggagatttcctctcagatctcatgtagcttgaagagtaagtgaaaatacagggtgcctctcattccctgctcactgccccctcgcccgccacccttcatccacatttggagatgtgtcacttaggcctctcatgtagaggccaggtgtggagtctggggaacatctgggaatgacatgcatttttctaattttctgtcatctgtttcttgataggattcattttcgtggtatccttttttttttcaagtgaattagcagtttaatataccatactcatgaattttctcacttttcattgaaaacctacacataattttgaagttaacttaaaaaagttgagatgatttcacatgtgcatctttaaagacttttggtgctgctcataagtatgacctgcgtccccatcagagaaacacttgcaggagtccttgccctttgtccctcagtagctccatcttttagctaaggggatctccagcaacagcctgtggtggttgcaggtgccagtgatccccttggttcaaaagagtgctttttattttctgaaaggttgagttacatttacagtaggtcctcactaatgtcatcagtgggttcttggaaatggcgactttaaatgaaatgagtacagcaggtctttgagtaacatggtttgattcaacatcatttcatcataatgttcatgagaaaaaaaatttttttatatcttgcttaaagtcatcatttccaacaacctattgatgacgttaaatgaggacttactgtccttgcctgaactgagaaaaaacaatttctattttattatatatagtgctacagttaaaaaaaagatttactttggatttaaatagttggttttgttcttatatctaataccttagtcctttactttgtttattaagaaaaaggggccaaatggaggtttgataagacagtaattttctttcttttctccgactgtgtctcagatgttcaagagatagtagttttctatagttgcttttgacaaatgtactctggacatactaatttggtttatttttaccttaactgataccagcacattaataagaaatactcatgcagtacctttgatgttttgtaaaaagtaaaagtatataaagactccttacatgggaatgtgcaaaaagtttttaattcatattcaagaagccaaatacattgaattaaaaggatctgtgttgcaatatatcatctgtggcatactactttcaaaaacagaaccactaaaattgctgtaatcaaaaagctctttgtttttgtttttcttactcgaaggctagtaaattcttcatgactgaagttatcatcatcatcaactatattatagtgcttatttagtgatttttcttagaaaattgggacataatacgttttaatcttacctaagataactttaaaggctgtgaatattttagttcatccacttgacttttgatgttaattttaatttcgtcagattgtacatttattttgatacaatactttaaaaaattttacttataaatgagctagagaagctccgtcatgctttgagtttgtgttattgaacacaaaggagacctaagaggcaatatacctctaggtagatagagcaggtctgtcctcgtaccaaattgacaactcagaatatctgcagatgatgggacactggtgtcaactgtgtaaatggtaacacaccgttattttgctgtagtgactcaaagcagtaatagtatatgatatcctggatcagtgcttctcacatttttctgctgagatacccctgatggtagagaacagtgaacttgtatgctaaaggtctgaggcagagggtagagtagttggctgataatctgaattgtttttgaaatctcagcttttaatcttaagaattcacttagattttgtatgctactgcataatatatctttcatattaaaaaaaaatagcctcctggaaggcgtgtgatgtcgatggcttcgtctgtttctggacacatcacagctccttgaggttctgacccctgttgagtggtgctgtccatgcttctgtcagcaaggagttcatgtgctgggagactcaataagaatcacatagttctgtctgaccactgtctggccatctatcctctactcctcccattccccctctacagtttctcactcatatgcaacgatcctacttttttcccttgttttcctttttttgttgaggggttgttgaaaagtcttcaaaagcttttctgactcataaaatttctgtagttgcaattaatatgtaatagtgattttttcttttcccctagggaaaggcttttcaggtgtctctgtatttaagtgattctaaaaggtgaaccaaaaaaaaattttgaatatgtgttggtaccacttgccttattgaaatagaatcttttggaaataactgaaaaatgatttcattggtagagtgaaattaatatctgtaagcaaaatttattcaaatgtttatgttcagttatattttctaatgtaaagttgttgattttaaggtatttttgacgaactctgcaaacatctttttgttggaaccatgtgctgaagttcctgtgctcttgaaagaacaagttgatgcttgtaaagctgttttgattatttttaggcgcatgataatggagcttacaatgaataaaaagacatggtaagtttatatcaaattaattagtattgtaaaacagatgtttctgtttttcaacataattaaaatgttaaggcttgcatttatttaatgtttttacgaacttaacaacaaaatgtcttttgtaacagtttctgtgaattatgaagaaggtagttacccagtactttgacagatcaattattttcattatatttttaaaaaatgttcttgaacaataagtattttacttaatagtggatttttccttttaaacgttaaacatagttttgtggaaaagcagcaactggtgttttataatactcaccataagctcaggagagtttgttaattgccctgaaatgctgtcaactgatttttattgcttctaacttgacgttttaaattcattttggaaaagcaattattttaaatgataaattatcagaaactaaatacatagtgcagtcaacaatctgttcctgtcattaaaactacgttttttccttttcatctttgtttttgtttgatgtttttatttataatgtccctacaggtaaacaatgcattagatttttttttcctgctcttatttgaaagttatcagccaggtgcggtagctcatgtctgtaattccagcactttgggaggccgaggtgggtggatcatctgatgtcaggagttcgagaccaacctgcctaacatggtgaaaccccatctctactaaaaatacaaaaaattagccaggtgtggtggcacttgcctgtgatcccagctactcgggaggctgagacaggagaatcgcttgaacccggaaggcggaggttgcagtgagattgcgccactgcactccagcctgggcgacagagtgagactcttgtctcgggaaaaaaaaaaaaaaaaagtcctcacgttactccatctgatgaggtattttcactgatgctcagcaacagaccagaaagcctcagagtcactttccatttcttcctcttctccatgtgtcatcagcctctcacttctgcctttaaaatgctcctcaagcctgtcctttgtgtgttccctctcattccactgccacccttgtgcaatcaagctgcccgcccagctgtggtcagcatccccctaggtgatcttctgccttggttatcagtccttggaggccctgcagaccagtggcacctttcctacctgaaaccagaagggtcctctgcctatgcctgtattctggaggcccttgaatcagcaggaaaggggctttggaaagtgtctgcagttggtaggaaaccatggacacgaggcaggtctgatcggaaaggaactgtaggccaccaagtccaattcttgttcttcaaagatgagggaagggtggactcaagaatcttggtgtgcagaaagttcacaagtacagaaaccacaggcatcaaaatgatactatgatgtagattccaatgtcatctttcccagacttctaaacttagcactatttgccaagttaaacaattgttaaaactggaaatattacagtgatgcacaatatgatgtaaacaaattccacgtcagtaatattgacagtaatgagaaatgctggtatatgctttcaactgaaatatctgttcctgaataccatagttttatcaacatcatttttaatgtttttttcctttgaaaactccctgagttttgtatactactgtatcagtagttttttgatatttttgataatctttttattttgatgaaaattctaggaaataaaattaagcaattctgttctgttttttactaattcatagattcctaggtgaaagtatagaaaagaaaaattgtagaactcgatgaaaatagttaacggaaaaatggtcaatagagcatagaaaagagtgtgagcagtttctgtaatggattttcttgtgtatttaagtaccagataatcccttgcctcccatccctcctttccttcttcactccttcttctcccctctctccttacctccttttcttccatctaataaataactatcgagcttctactgtgagaatatagtggcgaactatgtagacaaggtccctgccctcatgaggttacatcctcataggactgagaggcattaaaaacctagaaaacaatttcagagactccgaagtactgagaacagtgaaggttgcaaaggggaaagagtcctgaattgggtgtgtgttgcttggcatggacagacggggagttttttccgtcagctgtcagagaaggcctttctgagcagagccctgagtgaagggaagggggagccttggggaggtctaagggaagggcattcctggtagaaagagcagcagatacaaaagccctgatgggagaaaaggtaaaagaaaagtggcttgtttaaggaaggacaagatgatggccaatgtggtggagtagatggagtgagagggagcgtgagaggggaggaggcagggggcaggccggggccaggttgctcagggccctgcagaccaaaggaaggacaccagctacctccctgtgtgcctgcaagattgtgacataacataatttatgcttctgaaaggcccctctggctgctggagaacatgcagtgcagtgccatagatgatggtggctgagaccagggctgtagccagggaactgtaagaaatggtcctgaaatagggaataactggtatgtaaatgagttgaaatccacctgtatgaggagatagagatcaggaaaataatgaagaatgcaggaaaatcctcactcctgtgttggacccaaggatggcacacatgcctcattccatgtgctccaacagaagtttattacactctttgagcagttctccttggtggagtcagtgcttcacaaaatagaaaggaacaagcagttgtcaaaactggcagctttggcaggttgtgaatctttctactataaggaaagatttttccaaatcatagtttttcaacccttgttttcttccagaagactctgcatgcctttccaagctttcataggttcagaaatcaaattaactgtttttgtcagtcatggctttgatcacatttgtggcttttgatagcagttgccatgatcaaggctttacttgaaacttacgatgtctgttgttctcatcacattctcatgatggatctgtaactagttgtgtgtaagggattgtttttcattgtcttatgcatcatgtaacatgaatgggcagtggtgatactaggtgctgcccttctctgccctggcgacaggggcctgggtaccctgaatgtgatgagcgacaagctgtcccccagcactgtgccattgcttctcccagttctcttcaaagtcaccatcctgcttcagcgtgtgtgcccagaagatagcccttcctcttctgtgcttccagaatccgtaggcagggaataggaatacatggacaagtagcatgcagtgcagtgagaatgtataacaacagatgactctggggaccaaaatcaaatggggccagctacaaagagggcaggaaatccccacaggtgattttactgtgaggaattttatgaggttcagcatcatatattgttaggagaaaatgctgttttgataagcagagatatgagaaaagtaaacgggaactatgatttagagatctcatctgattactttgtcctattctcagttttattactaaagagcagtaaagccaaggagaaagtagtaaagattagatgaatggttagcatgtgaaacctgaaaggaaccagagtgatttccctcgaggaacaaatgcacttctcttacatatgaaagatgatgtgttctgtgttcccatagaatctagggaaagaaaaagtgagcagatactctgatatgagcaatataacttaggtgtaagaaagaaaaatgtcttttggctgttctgaagaacttattattgtaattagcagtgttatgttgtctctgtactattttatagtcttcaaagtccttttacataaaccttctgtaagagactatgaaaaatgctggcacattggaactgagctgcagtgatggcatttgtctcagttgtgccctgtagtgcagagtcaggatcttccagacatgagcactgtgcctgtaagtgtcctgtaatgcaaacccctcctgcctgtgagagtactgtggcattccaccttaccaagatactgactgtgtgtgtccccaaaataaaggccagaaagtcagcttcacctcctgttgcaatgagagggagaccttacaggttaagtaaaacagtggatagcaaaattaaagagtgctgcatatgttccagtaggttttcactgagtacctttaagctgctggcacagttggagaagacgatcttgcctctctttttgcaaggggagaaaatcaggctggaatgatgttttatcctgcctgtttgtgtggacatgggaggcatgtttttaaaactgttataacataagggagcttattttggtaaaatatggtattcattatgtaattggcatctggactttaatagtttcgagtaatacataattatcaatgttgctgaattcttaagagaatttctggtacctataaattaaagtgctttggagacatgattattaatatgagcttttattttgggtggcccagggaacagatgttgcaaatactactcaggataacagaagctgtcatgcagaagccaaaggataaacaaataaaggacttgtttgcccagagcttggcagggttactatttagggtaagtcttttttatgaaagcactgcaaatgcaagaaatgaatcagattttgtagcaaactagttttaatcattgagaattttaaaaataatattaaatttaaatttctagaaatttttcttcttagctttgtcctgaaggttatgatctgttctttacaattagtgctgggcttttaggcttttctccctctctgctacctacttcctcttttaatttgctcaagggtggtaggaattaggaagctctgatggccttggtggaaggctaggtagatttggagaggtaaaggatgaacgaaagtatgggaatgggataaaactttgagagccatcagtgtgttgggcaattgtatttaaagccacaggatgggcttacctagagaggacaatgtccacaggtgatgggagagatgctgagaaagggtggccagtgagtgaggaggaaaaccagaggagtgtgtatcctgggtgcctggggatgagtattgggtaggaggagagcagccagttgaccatgggctttgacagatgtagttggttgagaatgttctatgggatgagtcccacctggagtagatggaggagaaaatgagagctgggcagtggaagttgcaagtgtagttaaggctttgcagagttcttgctgtggaaaggaagaggaaaaggggagctagctgaagtcggtggcatacatggtgggcgaggtttaaggtgggtggtactaaagtatgtttgctcaccaatgggatggtccagtgagggaggacaagatggtcttggggagacagaggataagtgaggtcccggatatggtggagggctgggccggtctttggtgcgagcagagagccaaagagatgcctgtgcttcttgcatctcatgtggtgagcaggtgaagaccaagagcaggctgatacctggtgagctgcctggggaacagatgtgccagagagtcctgagcatggcagcctactgtgatgttgctaatatttatgaggaccttagagtttatgaagcattactgaaagtgaacagtgtgaaagggctctggaaaaatgctacattctacataaataaagatattagtacagtggatggacttgactttggataattacataggtgatagttgtggggaggagaaattaacttccctcctcagttgacctgaaggtggttttggaggatatatgttaaaaagcatatctagaatatgggtaggacatgtaggtaaaagtgacaaaaggagaaattatttctttaaagctaaatattgccattgtaacacaagataacggaattttgaataacttaatatgagtcaatgctcttggcttgataaaaaatgtatgagaggctattgaaataattggcctcctgaatattacaattgcttttactctgattgccttgcctggtacattggatgtgtgaagtggccctaaactttcttttgcatgtgtccagctttgctctgctgatgcgtggagggtggtactgaccactgctttgctgcctgcctggacatatggacactgcacactttgctttctcagcgaagcgtctcactgttggcaccctttcgagctccccgtcctggacctgggctgccaagtggacatgagctgaagccagtctcacactggcagatgcttgggccttattcccaccaattgcctggctctgcatctgttttgtgtgttggaattagagaacttgtcacagaattaaacaagtatctattctggggttcggatttttttgttttgttttgtttttggttggttggttggttttgatctttggggaaaaaaaaactccccccatgaatggagaaaaccttgtcagatattacttccctcctcagatgacctgacttccctgaagctcagttaacctgacttccctgaaacttagttttgagttcatgattattaatgattttgatgttgttattattttggcagtggttaggtagatcgagaaggatgcttaaattaagaactaaccaaaaggctgggcatggtggcttacacttgtaatcccagcactttgggaggctgaggcaggaggattgcttgagcccatgaattcaaaagcagcctgggcaatagagtgagacccctgtctctacaaaaaattttaaaaaaattatccagccatagtggcatgcacctgaagtttcagttacttgggagctgaggtgggaagattgcttgaacccgggaggttgaggctgtaagcaagctatgattgcatcactgtgctgcagcctggtcaaaagagcaagaccctgtctcaaaaaacaaacaaaaaaacctaccataaaaaatagtgaagagaggatgagctttttggcattaggcagattgtgtttctgatctcagctctgctactctctggctatgtggccttgagcacatgactttagctttctgagtgtcttccctaatctgtcacaatcaggaaaggacttcttcttaccctgcagggttgtcatgagaatcagagtgggcccattgggatttgtgatcatctgttgacctcccacgttcttacgtgagatgcaagaggcaagaatactaagggtctggacttaccagccaggctctctattgggcatcatcttggtcccacgctgccgttaaaacatgctatctaattagtattcatttgatcatgtggactgtctaaaatggctagacacttgatttttttttgaaaaattgagaacaaggagactgttaaaagggacgggacatttttaagtttttattaccctttttatctttttctagttcttctagtgtttgtttttttttctgtcagtagataacctgggccaccaaattttctttaagtgatgactgaatttgacttagttttaaatatttaccaaataatggtgactgccttattgccttaagtgatgttttaatttattatcagtgctaaatatgaccttatgcttgaagctctgatggtatatcaggaaactgtggtcctgctctttgtaatatgagccattactttaaagttacgcagtccccttagtgtgttggtagagtgaagtaggaagtggttggttagcaaatgttcataagaacaggagtgatttattagttaaggtgtttttaaaatacatcttgtgtgccaaaatgtatctgataaaacatcaaatttcagtactgaaggaaccttggagaagctcttatgcacttcttatttttaatgagaaatgtgactacagaaaggccaagtgactttcctaggtcacaaaccagggtagtccaggctgtttgtttccctcttccttttagaaaatggtaattgattaaaaggacaccctgccttcatgtccacaggtgccaccactcaccacccaactgtattttaccattttaccattttgctctgtgcacgtgttgtcagttgtgaattatgatgataattcaacaggtctgcatacatgtttgtaatatttgctaagttgattttataagctgcaagaagtcattctgcgcttgtttcataattagtcaataaagtgaagccattataagatccccagtatagagcatctcattacaccaagacatctgcttttatccatgaagctggcgctatatccaaatgtgagtctgagtcctaataacattatcagtctctactttcttctcttacttggctcagattatatttattgatctaatatttattaattttattgtctataggtacgttatggcaatggcctcaaattcatcttgaaagcaggggtataaaaattaataggagatggcattttagtcataataaaatatttaataaagataaaattattttattttctttcatatttttagttttaccaagttcatacatgttagaatcagactttaaatataagtggttaatatcttgttttttatataattaactactttagtcctactttaacatttttatgttcttaaaaagtggtaaacacaaattgaaacagagaacaggcgtattacagaaggaccactttaaataagattttccaggtggtcagaataggcctgtctgattttatagactgatttctgtttatcagagttttcctgtatctatgttaaagagtaaattccattaaaaaatctatatataatttggggaaaaaaattaagaagtgaactcacctacgcaaagaagaattcctgacaagagtgggagcctatttgcatctgggttgggccaatgcacatgcaagctggtatcttaacaagtgcatttctctttgacaccaggctatgggacttacatagactttgggtataaggattccttttcacaaggcttaggaaagcatttgtggctcatttgagatggacttggctatgtagaggcacttctttcagggaagatatatttggatttgaattttaaaggatggtgaatattttggcagaggtaaggaatggggcaattttatgggaaggaaatatccagcatataggcataattgtctcatagggctgtccaggtgaccagttgtagtgctgtggactataagactgggggcagacactgataagtgaatagactgtgaaggaaaggtgtgataggtgcattgatggggggaaaatgcagggacctggaggacacttcctggaggctgggaggtggtggtggggagatagtcaaggataccttcttggaggaagtgatgcacaaattttgacctgagaaatgagggggagttatacagaaacaaaaaggaggaaagagagggaaggaagagtatgtgcaaaggccagatgcaggagcgagcaggtgaaggcactgagagaaagtcagtggaagaaattgaataccttttactattatgctctttgataggtgcctgagggttgtgtaagtagcactgtctagtacctaggtagatagatcaggaaaccagtagagaggtctaagctggacatggagattcagaagtcagcagcacacagaggataactggagccatgggaatggagccaaaactcaggcagaaggtggaagtggcctcagaaaggggagaaccagagcagtctgttgcctgggggatgaggaagtggagatggagcgggtgtggaacattcgttcaagaagtttggctgtgaaaatggaaggaaaagggctgtagctagacgggggaatctgggttcaagggaattttttcttttaagatgaggaagagtttggagtatatttaaatgctgaagagaaagagctggggaagtggggttggctggagattaaaggagaggggtggttaagagaggcatgaagactccgaggaaggggtccagagtgtaagggggcaacagggtagcagagcggggcccctcttggagttcagcccacaggtggaggtggagctgggtgaatatgggcaagaatgtgagtccatgggcagaggttgaggggagtctcattgaatgggttctgtttcttgtgaagtctgcagtgaatccatctgctcaaagtcagggaggatttggtgggctggcggttttcctgtaggaggtttgaagtagccactgtggatggtaggaaaagagcagtctcaggaagcagagttgtcactgtgcggagggctttgtcttttctctgattatagccagggccagctgcagacactagaacaatattgaatcagtaactttgttcataatgataactaactccccaatagcttaaattttgattatagttggtcaaatgaattttgagaattaaaagaaaaacaacttccaaaagtactttttattttaaaatttgtgttattaatagtaatttaaaacattttgtttaaaagtatgctttttccaaatgaagatgtgtgaattctcttgttggttggttggttttagacgctcatggtagcttggatccgagcaaacctctgtgtgtacatttctcgagagctctgggatgactttcttggtgtgctgtcctccctcacggaatgggaggaacttataaacgagtgggccaacattatggactccttgacagcagtgcttgcaagaaccgtttatggagttgagatgacaaacctacctctggataaattaagtgaacaaaaggaaaagaagcaacgaggcaaaggtatttccactcttccaggttaacaccagatgtctaggactggggacgagtgtgtatttgtatgactaagcaattaatgcgcgaaattttataatgaactgaaccaactacacagtgtcttcttaatagtggcattaatttgtgtctcatatcattctgttcccttaatgagatggtgaatttctgaggaagctatgcaagaaggaagatgcaaggaaggtagtagtaatagtagtgataactaacagtaataataatggctattacattgtacatattatctctttttaccttcataataacctagtgaactgtagatacttgtattatccccatatcacagacaaagaaactgaagtacagagactttgcagggatgtccaatcctttggcttccccaggccacattggaagaattgtcttaggtcacacataaaatacagtaaaactaacgatagctgatgagctaaaacaaaaaaagaaattgcaaaaaaaaaaaaaatctcataatgttttaagaaagtttacgaatttgtgttggtctacactcaaagccattcttggcttcatgtggcccatgggtcacgggttggacaaggttgccttacagtgattgactcatccaaggccacatagttaagaagtgtttagaaatcaaagctggataaatacaactcaagatgtcacactattaagatgcattctacagcctctctaggaaacgtggagaaattctgaatgcttcagatgggagctattttggctttgttgtatttctgggtaaaagttgttttgggactgagaacctcaaatgaaagttatgttttcaaggtagaaaacatcagtggtagtttctattaggaatgacaatttggcatccccttaattactgtgcttaaggatgtggcatggtccttggattaattcacttgtactacaccttactctgtaaagatttgaggcagctcatagaaaggcatatagtacagtagatcaaatacaaaatagggtcaaaatgagtgaggttgcagggaactgccattgtgattaaaatgccaaaatacatgccatagagcctcgtgggcttgctggggagatggaaaagtcaaacattggatttgattttggtctttgcagggttacatcaaatagagaatcacagagcacatagggtaaaaacaattcaatcacttaggtgatgcttagcttttattaggtcctcctgagacttgggaggaatttttccttcaaagcttcttaaagggtacacactgcttattgtgtagactaccctttaataataccagctgccttatagacagtatcagtgtgcttttgccatgtgacaaatcaccccaaaacttatggcttaaaataacaaccacttatttatcttgatttgatgagttggcaatttgggttggactcagccagtcagttcttctgctggtctttgcttctgtgtttgcagtcaaccacgctgtgaaatagtcagctaggcagctctacttttacgggttgactggctgtcagcaggggcaatgaggtgtgactgggccacgtgtttcagcagccagaggctagctcaggcttgttcaccaagtggcttagagtttcaggggcagtaagagggtaagctcaaattttcaagtgcatttcaagtctctgcttgttcagttttgctaccaagtaagtcacgtgatgaagcctaatgtcattacaggagagaacaacagaggatgtggatacagggaggtgtgaaccagttacagtggttagtaaaccatatacacgtataataaatgtggtggattcttatatcttcattgaaatctgagaatggcttgccaaagcactaattaataaaagcaagttagtaagaagccaaaataaagtagttgaagtacatggcaatccagtggaacagtttaatcccaatgtagatttagactgtctaatgcaatgattttctaacatttttaacagatccgtttttcttcccggttgaaggtatacacaactcctttctaaagaaatagactggagatttaggattgaagtaggggcagggagccaagagtctgggcccttggcgtccatctagtcctctctgacagctctgaggacctttgtgtaaacccggggcctgagaggacccagatacttccaactaggaacttgcctccctaagacagtcgttctcagcccagaagagaacttacctggctaaggatacctttcaggccagaggaggagagctgaaataggagataaggacctaccttcaattgttgtaatccatgcacgagtgcacatgtgtgcatacactacacacacacacacacacacacacacacacacgcctgccattctgcaagattctcttcctacccacagattcatctaaagagacagacttatcttaggaaggcaaacaacttcgaaaacactgttttcaaaatgtaccgaacacattatttaattagtgaccatgactaatatttctgatttatgttgctttattctaaaaaggatttaaatatttattatagaaacacttgccttctaagggctagactactagaaacaaaaagcacaggcagaggaaactgggtgtggaaacatgccacaggtggcagccactggccacatcatacctgtgcagaaatctgtaagtctgccattctctttcctcctctatttcttttggtccatagcctctcattgaaataattaaccagaacaatatgaggaaaaataaaagttgaatctcagactacaatgttttattgttttggacctttgctaaaataggattttgtattatttgtagattttcattatcctgcccatttgactgaatccacattagagtttataggcatggattgctctggggatttgtggaggggttggtgtctacaggatgcagtactattctaacatcaggatctctgagtttttggtttataagtagtggtttttggagtgtcctgggaacagtagtataacttcatttgatattgttcttgtattgagaaaggtttattaatactttcttttgtatattggaatgagtactatgaagatataataatatccataagactgttttagattcttgaaaatattttggcaacaagaattcttaaattagtgacatatgagcaacttcctaaattgcagtgtaaggaagtggtacttaatttgtgacaaggaaacctgctgattatatatagttgtaggtacaccatttgctgagcaacacaagcgtgaaatgaataataatgaattcagcctttagattatttttcttttcctttatcaggctgtgttctagatcctcagaaaggaaccaccgtggggaggtccttttctctcagctggcggagccacccagatgtgaccgaaccgatgcgatttaggagtgccaccacgtctggagcaccgggagtggaaaaggcaagaaatattgttcgccaaaaagcaactggtaaacatttatttaaatgcttctcaaaaatctaattgttatctaaaataaatttataggcataaagtgtgttaaaaattctactcaaaatttaaatattagaccttatattaaatgaaatgtctctacatctttttagctttatgctctggttacttttcaaatcacagttttcagttacttatttctaaatcctccattgtgagaaagaacttgtgatgttgatattgagtgagatatttgtgcgaaatagagaaaatacaggttttgtttgaaccttgaagaaaatagattgttaataaatacaccagtagttgcactattgtcagtgttaaacaatattaatctttagagtgtggcaacctgtttcagcaaagaaaaggagaatttcaggactggatagacattttcattttttgctcctttggaaaattgagccttttcatgcctgtggatgttatctttgcagcgtatttcagttaacaacttgaccaacaacccccagttaattggactactttgctacattttactctttttttcttttcttttcttttcttctcttctcttttctttttttttgagacagagtctcgctctgacgcccaggctgaaatgcaatggtgtgatctcagctcactgcaacctctgccttccgggttcaagcaattttcctgcctcagcctcctgagtagctgagattacaggcgcgtgccacgacgcccggctaatttttgtatttttagtagaaacagggtttcaccatgttggtcaggctggtctcgaattcctgacctcgtgatctgcccgcctcggcctcccaaaatgctgggattacaggcgtgagccactgcgcccgccctacattttacttttaaaacaaaaagtgaactctttaaaaagaagcttgtatacggcatttaataagaataaataaagccacctcctccccagtgactttgagcctgtaacttaggtttaagacaattgtaattgatatttaacatgttgacttcagaaagtcgcaagatcctctggccataaaacaaagattcattaaagcttaacatattctatagtgcttagtaaaggcttaatacagatggtttagaatcctgttggagtttttatgaaaatatattccaccttaactgtaactctctcatacttttttgctgtagcatttgctggaaattatcaccttatttacatgcacagcctattctgcttctttctttctttctgtcattctctcccctgaggagagacccaattctttgttagcaggcaacttttgaggatgctcattcactgatttcctttctcattccaattcctaaaaactatttgcttttatcattggattctttttttgttttgttttttgagtcggagtctcatgctgttgttcaggctgaaccgcagtggagcgatctcagctcattgcaacctctgcctcccaggttcaagcgattctcctgcctcagcctcctgagtagctgggactacaggtgcgcaccactatgccaggctaattttttttttcttcagtagagacggggtttcgccatgttggccagactgttctcgtactccttaccttaggtgatctgcccgtctctgtttcccaaagtgctgggattacaggagtgagctgccatgcccagctcttctatcattggattttttttttattttttattttttttgagacagagtcttaaaaaaaagcccaggctgaagtgcagtggtgtgatcttggctcattgcaacctctacctcccaggttcaagcgattctaccacctcagcctcccgagtagctgggattacaggcatgcaccaccatgcccagctaatttttgtatttttagtagagatggggtttcaccatgtcggtcaggctggtcttgaactcctgatctcaggtgatttgcctgtcttggccttccaaagtgttgggattacaggctcccagcctattgggaattcgaataggcaaagggtaggagaaagggcagtagggtaaaaagtttgttccggtttttgcaaatgtgttactatcatttgtagttccatttcattaatgttaactgatgtcatatgaaaatagtaaagcagcaagtaaatctttatatttttgttttagaataaaactgattttacagattgtggttttacatatatgaagcacgttttcctcctatgttcattcaattcctccaatatttatttgactagcagtatatagaaaacataagaacaccgtaaagtagacacttaagatgtatggatttaataagcatgaaatgtgacataaaaggatgggtttcatggagattttaccttttcctcaaatatcaaatcttttaatgttcaacttgacttttatgtgttcttgagctttttggatatttaatttactaaatgatttgcttttgaatacagtcagctctcagcaaaccaacttctgaatgaaggccagatatgccctctctcaccatggtctttttgtatttgtcctttaggaaaggaaaactgattataatgtctgtccaggcaaataacctgaatgtgaatctgatacacagcagaaagaaggaaaggctaaacatataaagcatttcaaaataaaattatttgtggattgcccattgtcctgtgtcatgagaatgactgactgaaagttggctgtatttagagactacaattaaatactatactttgtactgacttcctttaaagtttaaaagtttaaatgacctcctttaaatgtttaaagagagcccagaaaagtaataataataaagtgaaaggtcctattgttcttctgacataattattactttatctctcctggaagctaagcgaagccagtctatcagcaactgtgtccacc

SEQ ID NO: 862 - DNA, 3734 bp, Homo sapiens
tttttggcctacttacttcaacagaaggatttacctttctctatattgaataattaggcctatgtctatttatttttcagtgattctaggatgaactgaatcttcttccttaaaagagaaagatcattttcatgatcttttttattttcagaaatttggcgttgtagattagtattttttgttgttgttgtttttgatttttttgagacagaatctctctctgttgcccaggctggagtgcagtggcatgatctcggctcactgcaacctctgcttcccgggttcaagcagttctcctgcctcagcctcccgagtagctaggactacaggtgtgtgccatcacacctggctaatttttgtatttttagtagagatgaggtttcaccatgttggccaggcaggtcttgaactcctgacttcgtgacccacctgcctcagcctcccaaagattagtattttttttaacattggagataacctaattgtggctttctgtagtactaaactatgtcatactgtgttttagcaaagcaaaatgaaagcttacgttctctgatggctatgtaaataccatattactttatagaatttaagggaagaagttttaccaagagcgaggactataatgtttcttagaaaactctttttctccagtaactattaaaggtgaaaaacagtaagaatggtacatgggaaaatggtcactagtcaattacattactgttgagttttaactgcccaattatttggttttcaaaaaaagctattgtttggagatgattaataaagtatttaaaatgattttaccccctgtttggctaatacacaccccaaaagaatttttttcatggtgaaaagttttcttatgtcacagtccatttttttctatattttgtttctcttaagtttttcactagtttgtccagaacatgttcccacaagaaatctcttcctattagtaatttaattttggaagcttttgttctcattcaatattacattttattttactaagactcttggttcctgtatatacgtatacagttccaactgaagttaaatgtgatttagagcagtgattctcaattggggacaatttcaacaatgcctggagacatttttaattgtcacaagtgggacagtgctagtggcagcttgtggatggaagtcagggatgctgctgaatagtctgcaatgcacaggacagctcccaaacaaagaattgtctggcccaaaataccagctgtgccgaggctgagaaatcctaagtcagagtgaaatcaagtggcctgggctcggtctgcagttttcctgcctttgccatctttgttcttggttttgtagcacaaagggtgaaagaactttagagtatagtgactttgagaacaacctgacattccaactatgatagtgagcttcttagcctgatgccattggttctttactacttaaaatgttgccattgtcctttatgactgtcctatcaagagactgacccaagggcagattgtatattctccactggttggcacattagagtattgaatttgccctccaatttaaatccaagtatgtaggcataccccaccaacatactgctagataatatgacacttaattttactttctggcacaagctccttaccctatcaatgattgctaattttgtttacatttaagttaacatgattgctaattttgtttacatttaactttttttgtttttgtttctaatctatgtgatttagaaacccaccaaaattgttttaataatataagcaatagacaattacttacttttagctacgattgtttgtttttctgatcttttggggactgtatttggcggcagcagcagaattttgggtgggttgttcatattctgggaggaagaagtgacgtttgtattttggagtcacaaccacctgtttccattaatatgaatagctacataaagaaacacagttggggaggtaggactggcactttttgtgattttcttttatttgtttttttcccttcgtgagaacagttctttccagctgttctacagtttttttgtttgtttgttttttgtttgtttttttttgagatagagtcttgctttgtacctcaggctggagtgcactggtgcgatcttggcccactgcaacctctgcctcccaggtcccagttcaagcaattctcctgcttcagcctcccgagtagccaggattacaggcatgccatgcacagctaagtttttgtatttttagtagagatagggtttcaccatgttgaccaggctggtcttgaattcctgagcttgtgatctacccacctcggcctcccaaagtgctggaattacaggtgtgagccaccacgtccggtctgttctacaattttaactgctttttaggttaaaacatttatcaatctgtagcacttacagatagtagattttatttttcttttaggaatattgtaatagtagtaatgagaggatcaacaatctccccttattctaaaaaagcatattggaatggtatggcaaaccttgcctcgctgcttctgcatctggtttgtgtgcttctaggaagtgcttttttgtcaggacctggtctgatttacccttgggaagtttgatcttgtgggaaacctcaagatgctgagctgatatgcatttcctatgctttttataggatcagattggtatcatgcaaggtgttttaaaaattaggaaattatactatttattttgcttatgcaaccttgtataagggataaatggaactcagaattttggttattgaagaatgagcctcactccacttactaaatgtaagactgagtaaggaagacttaaaaagtgagtgaaattgctgtgaaaaatagagatctggaaaaaaaaatagaagttactgaagagcttacacacttaatttgatcacactgccttttctcagtggaaaaaaatgaaattaagtaatccttatttgatcatttttcggtgtttcgaatggagctttagaaagtaatagtttaggccgggcgcagtggctcactttgtaatcccaatactttgggaggccaaggcgggtggatcatgaggtcaggagatcgagaccaccctggctaacacggtgaaaccccatctttactaaaaatacaaaaaactagccagttgtgtgcctgtagtcccagctgcttgggaggctgaggcaggagaatgccatgaacttgggaggtggagcttgcagtgagtcaagatcacgccattgtgctccagcctggccgacagagcgagactccatctcaaaaaaaaaaaaaaaaaagaaagtaatagtttagtaatggtattgtgtaacttacactgtcaagagacgagaaagttagtgcttttaaaatctgggtagttggaactaactaggctttagagagagtacattatttggtgaatctaagatagaatttagctctttgaagtgatttaaacaaattgtgtgatattcaaaatagaaaatgcaatagatctaggatgtattatataattttattgtaactgatataattctttctccattttaaatatcagataatcctgtcttttggtatttgcatatcactattaaaatgattttcattcgttatgaaagagcaactgctaacagctaaccccacagaatgagagcagatttaacataaattgctctttcttaaataaaatgccagcagagggagcccaagaactattt

SEQ ID NO: 863 - DNA, 444 bp, Homo sapiens
atttgtggctaactttgtaaccttggaagaatacctctggtgctgtaagcctcggtatcctcatctgtgacattaaagcatctgagtatggggaacctctccctcttgttcccctcaaatatagaaatagtccttaaaactgataagcgaaaagcaaatgcatttctcctttaaattgtttaacattattggaatcttctcacattaaatcaaaattgttgtatggagatgtataagggaattccttaatgttaaaaagttcttataaatatgcacaatgctacaactttgccagaggctcttgttaacattgatagctgaactcattagtaacctgatatattagaaacctgatatatatgatatcaaaaaaataataataacaaaaaaggaaggaaggaagggaaaggaagaaggacaaaagcaaagaaaaggaaaaaaaaa

SEQ ID NO: 864 - DNA, 2314 bp, Homo sapiens
ctgcaggctttcaccagttctcaggatgcccatagggatgggtgaagcctgcctggcctgtggtgctttccagtggccgtcatctcattagggccccacagtggcattaggatgcacctctcggcggtgttcaacgccctcctggtgtcggtgctggcagcggtcctgtggaagcatgtgcggctgcgtgagcatgcagccacactggaggaggagctggccctcagccgacaggccacagagccagccccagcactgaggatcgactacccgaaggcactgcagatcctgatggagggcggcacacacatggtgtgcacgggccgcacgcacacagaccgcatctgccgcttcaagtggctctgctactccaacgaggctgaggagttcatcttcttccatggcaacacctctgtcatgctgcccaacctgggctcccggcgcttccagccagccctgctcgacctatccaccgtggaggaccacaacactcagtacttcaacttcgtggagctgcctgctgctgccctgcgcttcatgcccaagccggtgttcgtgccagacgtggccctcatcgccaaccgcttcaaccccgacaacctcatgcacgtctttcatgacgacctgctgccactcttctacaccctgcggcagtttcccggcctggcccacgaggcacggctcttcttcatggagggctggggcgagggtgcacacttcgacctctacaagctgctcagccccaagcagcctctcctgcgggcacagctgaagaccctgggccggctgctgtgcttctcccatgcttttgtgggcctctccaagatcactacctggtaccagtatggctttgtgcagccccagggcccgaaggccaacatcctcgtctcaggcaatgagatccggcagtttgcacggttcatgacagaaaagctgaacgtgagccacacaggagtccccctaggcgaggagtacattctggtctttagccgaacccagaacagactcattctgaatgaggcagagctgctgctggcactggcccaggagttccagatgaagacagtgacagtgtccctggaggaccacacctttgctgatgtcgtgcggctggtcagcaatgcctccatgctggtcagcatgcatggggcccagctggtcaccaccctcttcctgccccgtggggcaactgtggtagagctcttcccatatgctgtcaatcccgaccactacactccctataagacgctggccatgctgcctggcatggacctccagtatgtagcctggcggaacatgatgccagagaacacagtcacacaccctgagcggccctgggatcaggggggcatcacccatctggaccgggctgagcaagcccgtatcctgcaaagccgtgaggtcccacggcatctctgttgccggaaccccgagtggctcttccgaatctaccaggacaccaaggtggacatcccatccctcattcaaaccatacggcgcgtggtgaagggccggccaggaccacggaagcagaagtggacagtcggcctatatccaggcaaggtgcgggaggcacggtgccaggcgtcagtgcatggcgcctccgaggcccgcctcactgtctcctggcagatcccatggaaccttaaatacctgaaggtgagggaggtgaagtacgaggtgtggctgcaggagcagggggagaacacctacgtgccttacatcctggctctgcagaaccacaccttcactgagaacatcaagcccttcaccacctacctggtgtgggtccgctgcatcttcaacaagatcctcctgggaccctttgcagatgtgctggtgtgcaacacgtagcgagcaggccacagcctggcctcgggaaggtggctcctgcagttcagcgtccctgggcccattaatcccactgtggagacttctgggaactatttattgagcaggcctgtgcctccacatcatcttgttgtctctggggtgtggtgtcacagcactcctctttgccctagagataagggacctgacttccccttctcccatcctgaacatttgtacccctggagaagttccttagcagggaggaggaagaggagaggaggaagcaaagaatcacaaggaacctctggctaggtgatcctgatgtttcctactgagtttttctggtatccagatttctggaaaccgagtaatcatgtactgtttgattgggtggttcatctgcttccatcccagtgaaatttacctgtagcccagtgaagggtgtgtttggaacattcattaaatgattctaagcatcttg

SEQ ID NO: 865 - DNA, 2311 bp, Homo sapiens
  SITE (168): n equals a,t,g, or c
ctgcaggctttcaccagttctcaggatgcccatagggatgggtgaagcctgcctggcctgtcgtgcttccagtggccgtcatctcattaggccccacagtggcattaggatgccctctcggcggtgttcaacgccctcctggtgtcggtgctggcagcggtcctgtgnaagcatgtgcggctgcgtgagcatgcagccacactggaggaggagctggccctcagccgacaggccacagagccagccccagcactgaggatcgactacccgaaggcactgcagatcctgatggagggcggcacacacatggtgtgcacgggccgcacgcacacagaccgcatctgccgcttcaagtggctctgctactccaacgaggctgaggagttcatcttcttccatggcaacacctctgtcatgctgcccaacctgggctcccggcgcttccagccagccctgctcgacctatccaccgtggaggaccacaacactcagtacttcaacttcgtggagctgcctgctgctgccctgcgcttcatgcccaagccggtgttcgtgccagacgtggccctcatcgccaaccgcttcaaccccgacaacctcatgcacgtctttcatgacgacctgctgccactcttctacaccctgcggcagtttcccggcctggcccacgaggcacggctcttcttcatggagggctggggcgagggtgcacacttcgacctctacaagctgctcagccccaagcagcctctcctgcgggcacagctgaagaccctgggccggctgctgtgcttctcccatgcttttgtgggcctctccaagatcactacctggtaccagtatggctttgtgcagccccagggcccgaaggccaacatcctcgtctcaggcaatgagatccggcagtttgcacggttcatgacagaaaagctgaacgtgagccacacaggagtccccctaggcgaggagtacattctggtctttagccgaacccagaacagactcattctgaatgaggcagagctgctgctggcactggcccaggagttccagatgaagacagtgacagtgtccctggaggaccacacctttgctgatgtcgtgcggctggtcagcaatgcctccatgctggtcagcatgcatggggcccagctggtcaccaccctcttcctgccccgtggggcaactgtggtagagctcttcccatatgctgtcaatcccgaccactacactccctataagacgctggccatgctgcctggcatggacctccagtatgtagcctggcggaacatgatgccagagaacacagtcacacaccctgagcggccctgggatcaggggggcatcacccatctggaccgggctgagcaagcccgtatcctgcaaagccgtgaggtcccacggcatctctgttgccggaaccccgagtggctcttccgaatctaccaggacaccaaggtggacatcccgtccctcattcaaaccatacggcgcgtggtgaagggccggccaggaccacggaagcagaagtggacagtcggcctatatccaggcaaggtgcgggaggcacggtgccaggcgtcagtgcatggcgcctccgaggcccgcctcactgtctcctggcagatcccatggaaccttaaatacctgaaggtgagggaggtgaagtacgaggtgtggctgcaggagcagggggagaacacctacgtgccttacatcctggctctgcagaaccacaccttcactgagaacatcaagcccttcaccacctacctggtgtgggtccgctgcatcttcaacaagatcctcctgggaccctttgcagatgtgctggtgtgcaacacgtagcgagcaggccacagcctggcctcgggaaggtggctcctgcagttcagcgtccctgggcccattaatcccactgtggagacttctgggaactatttattgagcaggcctgtgcctccacatcatcttgttgtctctggggtgtggtgtcacagcactcctctttgccctagagataagggacctgacttccccttctcccatcctgaacatttgtacccctggagaagttccttagcagggaggaggaagaggagaggaggaagcaaagaatcacaaggaacctctggctaggtgatcctgatgtttcctactgagtttttctggtatccagatttctggaaaccgagtaatcatgtactgtttgattgggtggttcatctgcttccatcccagtgaaatttacctgtagcccagtgaagggtgtgtttggaacattcattaaatgattctaagcatcttg

SEQ ID NO: 866 - DNA, 2314 bp, Homo sapiens; identical to SEQ ID NO: 864

SEQ ID NO: 867 - DNA, 430 bp, Homo sapiens
ttttgttttgtttctgttgttgttaatgaacttagaatacagtgtactagaaaaaaaaagctagaatgtatgatacttggtcacggtaattttcatttcctgaagtttggaggtggggagtatatgatatattcatatgtgtgggcccaacctttggataagagtaggccagaagagatctcatgcctccaggaatgaccttcaactaagtaatgcccaacaggagttgatagacatgtatcccagcttccatactatatccagcatatgatcatgggaggaaggctacacatggcattaactgctcattaatgtaccctgtatgtgttggctttggtcccttctctgttctcactttcccattcccctacacgtgtttcatgggataatttctcaaactgttttgattcaaatccttgcccctgactct

SEQ ID NO: 868 - DNA, 430 bp, Homo sapiens; identical to SEQ ID NO: 867

SEQ ID NO: 869 - DNA, 430 bp, Homo sapiens; identical to SEQ ID NO: 867

SEQ ID NO: 870 - DNA, 8351 bp, Homo sapiens
tttattaccattaaaaatgatctaacaagctttatttttattattgttaaaaattctcattttgaggaacacaaccacaaagtaaagaaagttttcattgatttaagtaaaaaaccaatatttaataacaattttaaaaacatagctccaggccatccacatgctttaactcatgctcaggctcctgatattgatgggttgtctttgtatttttctgatgcccttttatgtgaattcacctgttttggaagaaaacacaattaaggttatctatcacaacaaccactatctccaatgtgtattcattccttttattcattttaagtctcatctacccgatgagataacttttttgaagacaggaattgtatgctgtttaacagtgctttgattcttccacagttcagtcatccttgctaccttgcagaggactggttctaggatatcgcccccacaccataccagaatctgtggatgctcaataccttacgtataatggtgcagtgtctgcatataaccaacacacccccccccatatactttatttatttacttacttagagacaggatcaccctctgtcactcaggctggagagcagtgtcacaatcacagctcacagcagccgcaacctcctgggctccagtgatctgcccacctcagcctcttgagtagctgggactacaggtgcataccaccacactagctaatttttttatttttatttttattaaagacaaggtctcactatgctgcccaggttggcctcccaaagtgttgggattacaagtgtgagtcaccgtgcctggtcccatgtactttaggtcatcactaataaaatgtatagatattgtataatgacaacagttgttatactgtactttctaattgtatttttattgtttctttcttcaaatattcagccttatctagttgaatctgaagatgtggacctgctgatgaagagggctgactgtatctaacttagggtcttgcatgcagctggtacttaacgcattttattgactgttttagctaacattcagcggacaattcctaataaaaaactcttaaaagtatgaaaaaaaggaaacctgctctaaagtggcaggaaaaccagcctgggcaacatagcaagatcttgtctctacaacaaaagttttcaaattcactgcctgcctgtagtcccagccactcaggaagctgaggcaggaggatcccttaagcccaggagtttgaggttacagtgagctagatcacaccattgctctccagtctgggtgacaacaaggccctgagaaagaaaaaaaaaagaaaggaaaggaaggaaagagtgtaagtattgaaaaggaagagacaaaactgtcattatttgcatataaaataataaatgttagccaaagaagcctaagagaatcaactaagattttactggaagtaatatgagaattcagtacggtggctagaaacaaaatcaagagagcagcacacaaacctcaaatgcttttcagatgtaccaccaataactaactagaaaatggaagaaagatcccatttacaatggcaatacaaatgtctgaagtatttaggaacaaaaatacaaagatctgttatctaacaaaagatgtgtaagatctatatgatggaaaccctaaaactcttctgaaagacattaacaagaaatgaattcatgacatgaaataccatgttctagaatgtcgtacagatgtcaattctcaaatttatctacaaatttaaggtaatcctattcaaatcccaagatagtttttggtggtggctgtttttgagacaaggtctcgctctgttgcccaggctagagtgcagtggtatgaccacagctcactgcatcctcgacctcccaggctcaagcaatcctcccacttcagcctctgaagtctctcatatggtgtccaagaaatggggacaaatctcaaaaagggactaggctcaggagggctggaatattcagggaagtttctttctttctttttttttttttttttttgaggcagagtctcgctctgtcccccaggctggagtgcagcagcctgatcttggctggctgcatgctccacctcccaggttcatgccattctcctgcttcagcctcacaagtagctgggacgacacacgcccgccaccacacccagctaattttttgcatttttagtagagacggggttccactgtgttagccaggatggtctccatctcctgaccttgtgatctgcctgccttggcctcccaaagtgctgggattacaggcgtgagccaccgcacctggcctattcagggaaggtttcaagcagaaagatgaactgagttggctttggagagattcacaggactcccacaggcagagtgaaataagggcattgtagatggacaaaggcacagataagcagcaatggggacggtgtgactgggggacgctgaggggctgctgtggctggaatggagggctgccaccataatggaaatggccaatgaggcaaataaggttggattaggagcatagcatcaagggtgccagcttattaaatccctcttccagtgtgctagcactggcctgctgggaaaagtaatacatcacataatcaaacaaaaggcaaaaagaggcgagctccaggaatgggcactgtaaacaggactcgccccagggtagccagatgtaggctttagatttgttgatgcaggttgagcatctctaatccgagggggaatgtctcatatggtgtccaagaaatggtgacacatctcacagagggcctaggctcaggagggctggagtatgagacattccccctcccctgtgaatttgaaaacgtggccaaaatttttttttaaaaatggctaccctgtagttctttaactggacctatttagacaacaccttacacactggagaaggatgatactatgtgaatctaataagtctacaagacaatacttctctcttttggctgtcttcttcctctccagggtgattacaactccgtgagggtggagattatatgtctctcatcatttaagcaacaaggaaataaattagtggcagagtaaggggtgactcagtgagtacatccaattgttgacatagttttgggtgggagaaattttgctattatatcaacttaacttcttaaaatagtctagtgggattaacttggttttatttcacagagacctcctggaagcgaggatcctttaacaatcctggaatatacattgcagtaaaagaacaaagcacacctcagccttaaatgacagaagaagaatgtcaagtgggaaagtgacgttggttttcagtttgtggattctgaatccacacaaacacaggattgtattctgaaaacctgaattaattattgtccttacctctataagacaaaaaattataatcaaaattattagtattacagtcacagatattgcgaagatgagtttgttcttatagtcatctcctggaacttctttcatgagctaaaaaaaagaaaaaaaaaagaaaaaagaaagaacaattaaaaaaaaagagagagagaatggaagctaacttttcaaaaccccagtatgccagttgagtagcttacaggttcttttgttctttttattttttttgagacaggatctcactctgtcacccaggcgggagtacagtggtgcgatcacagttcactactgactcgacctccctgggctcaggtgatcctcccacctcagcctcctgagtagctggggctacaggcacgtgtcaccacacgcagctaatttttgtattttttgtgaagacggggtttcactacgttggccgagctggtcttaaactcctgacctcaagtgatccacccacctcggcctcccaaagtgctgggattacaggcatgagctaccacccccggcctacagttcatcttgtgccctaatctatttcactgtctacatgagcaaagtgggagatcactgtcatggccaaagttacatggccaagacaagctatggcctgggagtcccaggttctcctatgtgggcactctcctggcatacgctaaatgatgggaaatctgggtctcatgtttctgtgtggtcctcacctcacttgacttctgctctttctgttcattctgttccatgttctcattaatataatttgttttttgttggtccgtatcccattctacattcaatgcctttgcttcctgctgctcgctgagaagcttcatcaggaggcctgttcgcaacatgagcttggcacagctcccttgcacatgtgtttctgaacattccattttcaaggtccggataacatgagacatgaactttctcacatcctcgttggggatgagggaccgtagctgctcggttagctgaatttcaagctgatcacctggggacgagagcaatgggtaattgaagcttttgggctcaggggacaagtcaatgcccacattgttgtattcccattttgtctcagtttgtttaacagttggttctaagttgaatgcagtcccagcggaaactgcctcaggaggatgattgtagtttgtgttttcagagatgtgtctttgaacacatctcttttgtgtcttttacattagttgtgtcttttacactagtgttttctataaaacgttctgaaggagcaactacttccagaagagggttttcttgaggactcaggtctcctaaggatgaaaaaaccccttgcgaatttatgaggctcttcgctgcagagaacagcggcctctttgcgagcatcggtctgttgagataactgccctttctaaactttctaatctttttggccttcggtgttctgtgggccacacgggagtgagttttataaaagcggtatttttttctggaatgtgtgattggtttagcagccttcatgtttttcactctagccattgccatttctaaaattaaaatggtgtaggctaagtctttcgatctgtctctgacctgaggtagggcttttgcagggctagaggcagaaggcacgcccatggagaagggtttcagcacagaggagactgctgccttatgctcttgggtgaatgaaggcttggtgtagatggtgtttcccactaccttctcaggcccctgcactatgtgaggctgttccagctcccttggggctggaccctcaagcctttttcctttggcagcattgtccacaaatgcctgggcatcctgttctttcctagtgctgtgctttcccacctttttgaagtgcctttcctggatgctccttgggcccatgaggactctgttcactctctgcaggtttttgcctacactttgaatctgccaggctgttttcctgtggttgcacagtttctaatttttttttcaaatatttggtttttaaatttgttacctagaaggctggactgtgaggggctctttctattgtttttcaaaatactcaggagcctatctccatcttgtacatttgaaaatagctgttcagtgaacggtaacaatattgattctgcacctagatttcccagtgagagataaggcaagatgtaacttagtgcactgctaacatcactctcgtcattggtgtctagctgctcacccccaaagcctgacaagttgatgccactgctgtctgagggcgcctccgactcaatagtcagctgagtgctcatgtgctgcttccgggcttgtaacatcttcatgaacgctccttctggattccctacagatgcttcttcagctgtcagaaaagaagagactgctttgatcatgaaatatctttgatcatctttcatactcagtccatagctatatgccccagtcacacagagtaagagtcagcaaacattcgagtgccattcagagaggagaaacatacacccaaacctaaacctatgaaatggcaacaacgaaaggaggaaaagacatggccacctacttggaacattccatagtgtgacatagagtaactctgcttaggattattccgttgatccccaggggccaattgcccagtgctcagtcaaagcccaaggtggaagacaagtgcttccctgatgagctgatgaactggcctctctgcagactgctccataccctgtgctgtcctgcctcatatgcagagagagcacaaggctcccactctcctcatcctcagtgtgcccgtgttcttgctaccatcgcagctgaatgcaatcaaaggcggtcctctgagaggagcagggtggagatgctaaaggagcagggcggatgccccctcccattgctgatagatcctcatctggcatgtgctccacccacccaccccattctctgctcccacatatcatagccccatcacagaagatgcgacatggaaaaaaacactgtgtccaccttagttcttttcttaaatttgggcagggatccagggtgtaggttaagagatttttaatttgccagattgtatgcctatgttgttaaatatacaatgaatctatggtatggtagcagtttctggataaacattacttgaggtcctaaatgcagaagggaaaaagtgacttttgtcagatgcctacttcactttcattcatctctaatattttggatggggaaccatccaaagcttctgactgcatgaaggtcaagtgtgccagtgtgcagctgggcttcttttccagaattaaaagtattttgggtggtgctgaaggtcagcggaagaagtaaagattgcgagaaaggagaaacatgggcttggggagaacccagaattggggacagaagacctggcactaggctacagcacttagcacctctgatcttgtttttcctcacctgtaaaaggagattaacaatgcttttctgcccacctcttggggagaagggaagaatataattggtaaaaaaaaaaaaaaaaaagaaaaaaagaaaaagttttgaaaaataagcaacactgtctttatagaagtagccaagcattattaattatccaccccatatcactggtagatacctgtattcaagcagtcacattttagaagtcatgaagttggtgctaataaacctaatctacagaaaaactcttgaaaaaacttgagcatttgttctgcgaatagaaaggtttgagattcagagcaagttcagagttggatggactaagaatggaaaagccccattccaatagaagagccaggtagcaatttctggttatggaaccagaagctctcaggcttcaaataaaacagcatcacttctactcttataaaactgtaaaaacaaaaacaaaaacaaaaccggatctacatctgtcctaaaaggcagagagtacttgagacctcacagatataaaaccagcttacaaactacattgcactatatgaagaaattatcactgggggcaaagcaccaagcagagagcacagtacacagtgtgtggatgttaatgttattccctagccttcccatttctttctcttggtcctttatgcatatggaactgttccattattaaattttgtaataataactgagaacctgactcccagcaagggagtcattcagaagttgagggagttgaaatctgactgagtaaataaaacaattatatcatcagcttaaaatttcatcaattaaaaataaaaatttaaaaacaaatacttaaaataatgtaacaatttatcaccaggcaatttggactcacgacaatgtatgctgttagtcagacatgcagtgttgcaatgcagcttgactgtcttgcagacagcctcaatgctatttttaaattggcagaggcagcaggccatatggctaggtaagatcctatagatgaaaacacaaaacaataaattagtggtaaagcggttacttgagtaggtaaaggaggcagccaacgctaccacagggctgggcaaagaggtgttactgagacccgtggactggacacttgggtaggaaccagaaggccaatgggaaggaggacacaggtgcccaactgaagggtaagcatggcagtgagtatggtatgcctagaataaaggtggttgggattagaattgggtgacactgatcagtagtttaaattcagaggtatctcttcccgactcaaaagtctcactttgggctgaaagatacaggaagaaggtagacttctaagaagagtctgaataagcccccaacttctgaaggccctttctcaatttctgttgggagtgggaagtattagaaattactctaggcattaaaaatagctcagcttaacctggattgtggggttaaaaaaaataacggagattgcattggccaaatctggacaatttgagcattcaaaagaataacaacaataagctacaacataatatataaaaaa

SEQ ID NO: 871 - DNA, 8350 bp, Homo sapiens
tttattaccattaaaaatgatctaataagctttatttttattattgttaaaaattctcattttgaggaacacaaccacaaagtaaagaaagttttcattgatttaagtaaaaaaccaatatttaataacaattttaaaaacatggctctaggccatccacatgctttaactcatgctcaggctcctgatattgatgggttgtctttgtatttttctgatgcccttttatgtgaattcacccgttttggaagaaaacacaattaaggttatctatcacaacaaccactatctccaatgtgtattcattccttttattcattttaagtctcatctacccgatgagataacttttttgaagacaggaattgtatgctgtttaacagtgctttgattcttccacagttcagtcatccttgctaccttgcagacgactggttctaggatatcgcctccacaccataccagaatctgtggatgctcaatcccttacgtataatggtgcagtgtttgcatataaccaacacacatcccccccatatactttatttatttacttacttagagacaggatcaccctctgtcactcaggctggagagcagtgtcacaatcacagctcacagcagccgcaacctcctgggctccagtgatctgcccacctcagcctcttgagtagctgggactacaggtgcataccaccacactagctaatttttttatttttatttttattaaagacaaggtctcactatgctgcccaggttggcctcccaaagtgttgggattacaagtgtgagtcaccgtgcctggtcccatgaactttaggtcatcactaataaaatgtatagatattgtatcatggcaacagttgttatactgtactttctaattgtatttttattgtttttttcttcaaatattcagccttatctagttgaatctgaagatgtggacctgctgatgaagagggctgactgtatctaacttagggtcttgcatgtagctggtacttaacgcattttattgactgttttagctaacattcaatggacaattcctaataaaaacctcttaaaagtatgaaaaaaaggaaacctgctctaaagtggcaggaaaaccagcctgggcaacatagcaagatcttgtctctacaccaaaagttttaaaattcactgcctgcctgtagtcccagccactcaggaagctgaggcaggaggatcccttaagcccaggagtttgaggttacagtgagctagatcacaccattgctctccagtctgggtgacaacaaggccctgagaaagaaaaaaaaaagaaaggaaaggaaggaaagagtgtaagtattgaaaaggaagagacaaaactataattatttgcatataaaataataaatgttagccaaagaagcctaagagaatcaactaagattttactggaagtaatatgagaattcagtacggtggctagaaacaaaatcaagagagcagcacacaaacctcaaatgcttttcagatgtaccaccaataactaactagaaaatggaagaaagatcccatttacaatggcaatacaaatgtctgaagtatttaggaacaaaaatacaaagatctgttatctaacaaaagacgtgtaagatctatatgatggaaaccctaaaactcttctgaaagacattaacaagaaatgaatacatgacatgaaataccatgttctagaatgtcgtacagatgtcaattctcaaattaatctacaaatttaaggtaatcctattcaaatcccaagatagtttttggtggtggctgtttttgagacaaggtctcgctctgttgcccaggctagagtgcagtggtatgaccacagctcactgcatcctcgacctcccaggctcaagcaatcctcccacttcagcctctgaagtctcttatatggtgtccaagaaatggggacaaatctcacaaagggactaggctcaggagggctggaatattcagggaagtttctttttttttttttttttgaggcagagtctcgctctgtcccccaggctggagtgcagcggcccgatcttggctggctgcatgctccacctcccaggttcatgccattttcctgcttcagcctcacaagtagctgggacgacacacgcccgccaccacacccagctaattttttgcatttttagtagagaatggtctgtgttagccaggatggtctcgatctcctgaccttgtgatccgcctgccttggcctcccaaagtgctgggattacaggcgtgagccaccgcacctggcctattcagggaaggtttcaagcagaaagatgaactgagttggctttggagagattcacaggactcccacaggcagagtgaaataagggcattgtagatggacaaaggcacagatgagcagcaatggggacagtgtgactgggggacgctgaggggctgctgtggctggaatggagggctgccaccataatggaaatggccaatgaggcaaataaggttggattaggagcatagcatcaagggtgccagcttattaaatccctcttccagtatgctagcactggcctgctgggaaaagtaatacatcacataatcaaacaaaaggcaaaaagaggcgagctccaggaataggcactgtaaacaggactcgccccagggtagccagatgcaggctttagatttgttgatgcaggttgagcatctctaatccgagggggaatgtctcatatggtgtccaagaaatggtgacacatctcacagagggcctaggctcaggagggctggagtatgagacattccccctcccctgtgaatttgaaaacgtggccaaaatttttttttaaaaatggctaccctgtagttctttaactggacctatttagacaacaccttacacactggagaaggatgatactatgtgaatctagtaagtctacaagacaatacttctctcttttggctgtcttcttcctctccagggtgatgacaactccgtgagggtggagattatatgtctctcatcatttaagcaacaaggaaataaattagtggcagagtaaggggtgactcagtgagtacatccaattgttgacatagttttgggtgggagaaattttgctattatatcaacttaacttcttaaaatagtctagtgggattaacttggttttatttcacagagacctcctggaagcgaggatcctttaacaatcctggaatatacattgcagtaaaagaacaaagcacacctcagccttaaatgacagaagaagaatgtcaagtgggaaagtgacgttggttttcagtttgtggattctgaatccacacaaacacaggattgtattttgaaaacctgaattaattattgtctttacctctataaaacaaaaaattataatcaaaattattagtatgacagtcacagatattgcgaagatgagtttgttcttatagtcatatcctggaacttctttcatgagctaaaaaaaaaaaaaaaaaagaaaaaagaaagaacaattaaaaagagagagagaatggaagctaacttttcaaaaccccagtattccagttgagtagcttacaggttcttttgttctttttattttttttgagacaggatctcactctgtcacccaggcgggagtacagtggtgcgatcacagttcactactgactcgacctccctgggctcaggtgatcctcccacctcagcctcctgagtagctgggactacaggcacgtgtcaccacacgcagctaatttttgtattttttgtgaagacggggtttcactacgttggccgagctggtcttaaactcctgacctcaagtgatccacccacctcggcctcccaaagtgctgggattacaggcatgagctaccacccctggcctacagttcatcttgtgccctaatctatttcactgtctacatgagcaaagtgggagatcactgtcatggccaaagttacatggccaagacaagctatggcctgggagtcccaggttctcctatgtgggcactttcctggcatatgctaaatgatgggaaatctgggtctcatgtttctgtgtgctcctcacctcacttgacttctgctctttctgttcattctgttccatgttctcattaatataatttgttttttgttggtccgtatcccattctacattcaatgcctttgcttcctgctgctcgctgagaagcttcatcaggaggcctgttcgcgacatgagcttggcacagctcccttgcacatgtgtttctgaacattccattttcaaggtccagataacatgagacatgaactttctcacatcctcgttggggatgagggaccgtagctgctcggttagctgaatttcaagctgatcacctggggacgagagcaatgggtaattgaagcttttgggctcaggggacaagtcaatgcccacattgttgtattcccattttgtctcagtttgtttaacagttggttctaagttgaatgcagtcccagcggaaactgcctcaggaggatgattgtagtttgtgttttcagagatgtgtctttgaacacatctcttttgtgtcttttacattagttgtgtcttttacattagtgttttctgtaaaacgttctgaaggagcaactacttccagaagagggttttcttgaggactcaggtctcctaaggatgaaaaaatcccttgcgaatgtatgaggctctttgctgcagagaacagcggcctctttgcgagcatcggtctgttgagataactgccctttctaaactttctaatctttttggccttgggtgttctgtgggccacaatggagtgagttttataaaagcgctatttttttctggaatgtgtgattggtttagcagccttcatgtttttcactctagccattgccatttctaaaattaaaatggtgtaggctaagtctttcgatctgtctctgacctgaggtagggcttttgcagggctagaggcagaaggcacgcccatggagaagggtttcagcacagaggagactgctgccttatgctcttgggtgaatgaaggcttggtgtagatggtgtttcccactaccttctcaggcccctgcactatgtgaggctgttccagctcccttggggctggaccctcaagcctttttcctttggcagcattgtccacaaatgcctgggcatcctgttctttcctagtgctgtgctttcccacctttttgaagtgcctttcctggatgctccttgggcccatgaggactctgttcactctctgcaggtttttgcctacactttgaatctttgccaggcggttttcctgtggttgcgcagtttctaatttttttttcaaatattttgtttttaaatttgttacctagaaggctggactgtgaggggctctttctattgtttttcaaaatactcaggagcctatctccatcttgtacatttgaaaatagctgttcagtgaacggtaacaatattgattctgcacctagatttctcagtgagagataaggcaagatgtaacttagtgcgctgctaacatcactctcgtcattggtgtctagctgctcactcccaaagcctgacaagttgatgccactgctgtctgagggcgcctccgactcaatagtcagctcagtgctcatgtgctgcttccgggcttgtaacatcttcatgaatgctccttctggattccctacagatgcttcttcagctgtcagaaaagaagagactgctttgatcatgaaatatctttgatcatctttcatactcagtccatagctgtatgccccagtcacacagagtaagagtcagcaaacattcgagtgccattcagagaggagaaacatacacccaaacctaaacctatgaaacggcaacaacgaaaggaggaaaagacatcttttgaaaacatggccacctacttggaacattccatagtgtgacatagagtaactctgcttaggattattccgttgatccccaggggccaattgcccagtgctcagtcaaagcccaaggtggaagacaagtgcttccctgatgagctgatgaactggcctctctgcagactgctccataccctgtgctgtcctgcctcatatgcagagagagcacaaggctcccactctcctcatcctcagtgtgcccgtgttcttgctaccatcgcagctgaatgcaatgaaaggcggtcctctgagaggagcagggtggagatgctaaaggagcagggagggatgccccctcccattgctgatagatcctcatctggcatgtgctccacccacccaccccattctctgctcccacatatcatagccccatcacagaagatgcgacatggaaaaaaacactgtgtccaccttagttcttttcttaaatttgggcagggatccagggtgtaggttaggagatttttaatttgccagattgtatgcctatgttgttaaatatacaatgaatctatggtatggtagcagtttctggataaacattacttgaggtcctaaatgcagaagggaaaaagtgacttttgtcagatgcctacttcactttcattcatctctaatattttggatggggaaccatccaaagcttctgactgcatgaaggtcaagtgtgccagtgtgcagctgggcttcttttccagaattaaaagtattttgggtggtgctgaaggtcagcggaagtagtaaagattgcgagaaaggagaaacatgggcttggggagaacccagaattggggacagaagacctggcactaggctacagcacttagcacctctgatcttgtttttcctcacctgtaaaaggagattaacaatgcttttctgcccgcctcttggggagaagggaagaatataattggtaaaaaaaaaaaacaagaaaagaaaaaaaaaaagttctgaaaaataagcaacactgtctttatagaggtagccaagcattattaattatccaccccatatcactggtagatacctgtattcaagcagtcacattttagaagtcatgaagttggtgctaataaacctaatctacagaaaaactcttgaaagcatttgagcatttgttctgcgaatagaaaggtttgagattcagagcaagttcagagttggatggactaagaatggaaaagccctccattccaatagaagagccaggtagcaatttctggttatggaaccagaagctctcaggcttcaaataaaacagcatcacttctactcttataaaactgtaaaaacaaaaacaaaaacaaaaccggatctacatctgtcctaaaaggcagagagtacttgagacctcatggatataaaaccagcttacaaactacattgcactatatgaagaaattatcactgggggcaaagcaccaagcagagagcacagtacacagtgtgtggatgttaatgttattccctagccttcccattcctttctcttggtcctttatgcatatggaacggttccattattaaactttgtaataataactgagaacctgactcccagcaagggagtcgttcagaagttgagggagttgaaatctgactgagtaaataaaacaattaaatcattagcttaacatttcatcaattaaaaataaaaatttaaaaacaaatacttaaaataatgtaacaatttatcatcaccaggcaatttggactcacgacagtgtatgctgttagacatgcagtgttgcaatgcagcttgactgtcttgcagacagcctcaatgctatttttaaattggcagaggcagcaggccatatggctaggtaagatcctatagatgaaaacacaaaacaataaattagtggtaaggcggttacttgagtaggtaaaggaggcagccaacgctaccacagggctgggcaaagaggtgttactgaggcctgtggactggacacttgggtaggaaccagaaggccaatgggaaggaggacacaggtgcccaactgaagggtaagcatggcagtgagtatggtatgcctagaataaaggtggttgggattagaattgggtgacactgatcagtagtttaaattcagaggtatctcttcccgactcaaaagtctcactttgggctgaaagtatacaggaagaaggtagacttctaagaagagtctgaataagcccccaacttctgaaggccctttctcaatttctgttgggagtgggaagtattagaaattactctgggcattaaaaatagctcagcttaacctggattgtggggttaaaaaaaataacggagattgcattggccaaatctggacaatttgagctttcaaaagaataacaacaataagctacaacataatatataaaaaa

SEQ ID NO: 872 - DNA, 1443 bp, Homo sapiens
agtagagacagggtttcaccttgttgttcaggctggtctaaaactggactcaagtgatttgcccatctcggccttccaaagtgctgggattacaagtgtgagccaccacacccagcaaaataaccacagtggagagatctggaagatcaccttaaacaagtgatcaaacttagcattatgagccacctggggtcacgaggcaggaaagatacgtcacctatgcagtattcttcccaaagatgcttaccttgaatctcatgtggaaacagagaaatccagattgtgggacaacttacaagacaactatctttgactcaaaaaatgccaatgtcatgaaagatcaaaaaaagtagaggcatgttttagattaaaggaaatgaagacatgacatgcagtgcctgatctttgactggattctgtagtattctttcatctttctggcatgtttgaatttttttcaaaatataaatttgggcaaaagagataaccaagataattgattaatttattgttatggcttcttgggggcagtttcagagaaataaaaacaatctctgtaactggaataaattctcaaggttaatcttaagcagtatagcatggtcattaagaatacagattccacagccagactaggcttaaatcccagctctgtgaataatgtaaatttgggcaaattgcttaatctctgttccttggccttgtcattataatagtacctacctcaaatgagttttgaggattaaatgaatccctacctgaaaaatgtctggcacacactgagtgatcaataaatgttaactactgtaaatattacattatagaagttgtagggggggcctcttttgagtcctctaaaaggatgactttgttagggccacattaagactgtggaaacagaagagtattcaatggatacatgaagtctgtgagttgggggtatgatgtatagagttttaaattaaaactgtatccagtaagttggcctgatacatctttcaaacctatagaggaataatcacaagtgactcgtattcctttgggtccaatagaagcctctgatcttcatatagattgaatgtacccagaaccataacctagcattttacttatatagcaaccttaactctgacacaaagatgtttcttttgttttgaggctgagtctcgctctgttacacaggttgagtgcagtggtgcaatctcggctcactgcagcctttgtctcctgggctcaagtgatcctcccgcctcagcctcctgagtagctagaactacaggtgcgtgccaccacacctggctcatttttgtattttttgtagagatggggtttcaccacgttgcccaggctggtctcaaactcctgagctcaagcaaccccctctccttggcctcccaaagtgctgggattacaggcatgagcccaaaggttttgttattctct

SEQ ID NO: 873 - DNA, 616 bp, Homo sapiens
tgcagtgagccaagattgcaccactgcactccagcctgggtgacagagccaaaccttgcttaaaaaaaaaaaaaatctagcctcacagtggcttatgcctgtaatcccaacactttgggaggcctttatggcaggaggatgccttgagcccaggagtttgaggctgcagtgggctatgattatgccattgtactccagcttgggagacagaaagagaccttgtcacaaaaataaattttttttttctttgctttcttcctttttttttttttttaaagacagggtctcactctttcaactgtcacccaggttggggtataacagctcaacctcagcttactgcaacctccacctcccaggttcaagcgatactcccacctcagcctaccaagtagctaggactacaagtgcacaccaccacccctggctcatgtgttttgtgtatttttttgtagacattgggggttttgtcatgttgaccattttttttgtagagatgggggttttgtcatgttgcctgaactgggctcaagcgatccacccacctcagcctcccaaagtgctgggattacaggtatgagccactgcgccccgccaattttttccttttactgtc

SEQ ID NO: 874 - DNA, 667 bp, Homo sapiens
cacacactgagtgatcaataaatgttaactactataaatattacattacagaagttgtaggggggcctcttctgaatcctctaaaaggatgactttgttagggccacattaagactgtggaaacagaagagtattcaatggatacatgaagtctgtgagttgggggtatgatgtatagagttttagattaaaactgcatccaataagttggcctgataaatctttcaaacctacagaggaataatcacaagtgactcgtattcctttgggtccaatagaagcctctgatcttcatatagattgaatgtacccagaaccataacctagcattttacttatatagcaaccttaactctgacacaaagatgtttcttttgttttgaggctgagtctcgctctgttacacaggctgagtgcagtggtgcaatcttggctcactgcagcctttgtctcctgggctcaagtgatcctcccgcctcagcctcctgagtagctagaactacaggtgcgtgccaccacacctggctcatttttgtattttttgtagagatggggtttcaccacgttgcccaggctggtctcaaactcctgagctcaagcaaccccctctccttggcctcccaaagtgctgggattacaggcatgagcccaaaggttttgttattct

SEQ ID NO: 875 - DNA, 2046 bp, Homo sapiens
cctgcttgaagcctaactgtccaccagaaaggactgctctttgggtgagttgaacttcttccattatagaaagaattgaaggctgagaaactcaggtaagcacttttgttgtgggtatacttttaccttcttggtctcctcatctcccaggtggtaacaaacagaaatgactaaagcctatatgtgtgtgtagtggaaaggagcagagggaactgaatacagagaggatcctgaatacacgatgctgaatagagagaggggactcctgggggtctttggggatggggaaggaattaaaaaagttggagggcactgggtttactgagagcagcgggatggatatagaagaggactgaggtttggagcagaataagactaagatatttaggcaagagatatttagataaaaacttggggaaatatttgagaatgggaaaggactaagagaacctaaggagagagttagggatcttgagatgaagaggcctgggaatggttcaggaggatactgaattaaggtgaggtccaggaacagtttagatgtccagggtcccagaactgttcaagagatctaagttgaatgctaggttctgattccctcttcctcttccaccctctgcctctttagcctctatcatgtggaacagctctgacgccaacttctcctgctaccatgagtctgtgctgggctatcgttatgttgcagttagctggggggtggtggtggctgtgacaggcaccgtgggcaatgtgctcaccctactggccttggccatccagcccaagctccgtacccgattcaacctgctcatagccaacctcacactggctgatctcctctactgcacgctccttcagcccttctctgtggacacctacctccacctgcactggcgcaccggtgccaccttctgcagggtatttgggctcctcctttttgcctccaattctgtctccatcctgaccctctgcctcatcgcactgggacgctacctcctcattgcccaccctaagctttttccccaagttttcagtgccaaggggatagtgctggcactggtgagcacctgggttgtgggcgtggccagctttgctcccctctggcctatttatatcctggtacctgtagtctgcacctgcagctttgaccgcatccgaggccggccttacaccaccatcctcatgggcatctactttgtgcttgggctcagcagtgttggcatcttctattgcctcatccaccgccaggtcaaacgagcagcacaggcactggaccaatacaagttgcgacaggcaagcatccactccaaccatgtggccaggactgatgaggccatgcctggtcgtttccaggagctggacagcaggttagcatcaggaggacccagtgaggggatttcatctgagccagtcagtgctgccaccacccagaccctggaaggggactcatcagaagtgggagaccagatcaacagcaagagagctaagcagatggcagagaaaagccctccagaagcatctgccaaagcccagccaattaaaggagccagaagagctccggattcttcatcggaatttgggaaggtgactcgaatgtgttttgctgtgttcctctgctttgccctgagctacatccccttcttgctgctcaacattctggatgccagagtccaggctccccgggtggtccacatgcttgctgccaacctcacctggctcaatggttgcatcaaccctgtgctctatgcagccatgaaccgccaattccgccaagcatatggctccattttaaaaagagggccccggagtttccataggctccattagaactgtgaccctagtcaccagaattcaggactgtctcctccaggaccaaagtggccaggtaataggagaataggtgaaataacacatgtgggcattttcacaacaatctctccccagcctcgccagagatcaagtctctccatcacttgatcaatgtttcagccctagactgcccaaggagtattattaattattaataaatgaattctgtgcttttaa

SEQ ID NO: 876 - DNA, 7414 bp, Homo sapiens
gggggacccgaaggcagctctcccaggctgcatgtggctgtggcccccaacacactgcgtctggagatccacggggctatgctggaggatgagggtgtctatatctgtgaggcctccaacaccctgggccaggcctcggcctcagctgacttcgacgctcaaggtcagtgtgtgtgtgtgtgtgtgtgtgtgtgtgtgtgtgtgtgtgtcctttaaaagaggagaggaggtgggacagggttctagaagcctgggggcacgggaatagtccccattcccacccttcctaacgatggtggactccagacttgagtttcttaggagaaccttttataaacaccaaattttacaagtatgcccagtggataaaactaaacagggaatttcaggagaaagtgcagcaggggaggggaggtctgtggtctccccatttgcccccagccagggtcagggaggggctcagggctttccaggactctgtggaactctacttgggaccactcaggagccagtgggctattcccaagcttgacttctaagccacatttataggtgggccacccaaggctcccaaaggccaaggggctccccagcagtaggagtagctcacccacatggagacaggtggcctgctgtacacagcctcaagaccctcactggtgtcctgtgccctccctctccccagctgtgaatgtgcaggtgtggcccggggctaccgtgcgggaggggcagctggtgaacctgacctgccttgtgtggaccactcacccggcccagctcacctacacatggtaccaggatgggcagcagcgcctggatgcccactccatccccctgcccaacgtcacagtcagggatgccacctcctaccgctgcggtgtgggcccccctggtcgggcaccccgcctctccagacctatcaccttggacgtcctctgtgagtctggctggatgcagggtgggactcacaggaatgacagaagcccacagggatcacggcatggccggaacccgacaggtgtccagtggggaactcggtacccagtagctagtggagcactgggcaaggagcattaagagtagggggcgctggggtgagtcctgtctgggcagaggagcagtgcctcagactgggtggttgggagccataggggtggggagccagggccctcctgagtttgaatgccacctgcaaactggcctcctgcaggctgctgcctgtgactccgtgtaagcctctcatgccctgcagacgcgccccgcaacctgcgcctgacctacctcctggagagccatggcgggcagctggccctggtactgtgcactgtggacagccgcccgcccgcccagctggccctcagccacgccggtcgcctcttggcctcctcgacagcagcctctgtccccaacaccctgcgcctggagctgcgagggccacagcccagggatgagggtttctacagctgctctgcccgcagccctctgggccaggccaacacgtccctggagctgcggctggagggtaaggcagggcctaggccaagcccactgggatggaagcccactgtggtgtccggctgggcccggctgatcctggcctccttggcacaggtgtgcgggtgatcctggctccggaggctgccgtgcctgaaggtgcccccatcacagtgacctgtgcggaccctgctgcccacgcacccacactctatacttggtaccacaacggtcgttggctgcaggagggtccagctgcctcactctcattcctggtggccacgcgggctcatgcaggcgcctactcttgccaggcccaggatgcccagggcacccgcagctcccgtcctgctgccctgcaagtcctctgtgagcagagggtccttggccagggctgcccaggaggagggtggtggagggtgcttctgggctctggtgggagtgggcaaaggactgcagtgggcccaggaatgggcagttggggaaagaggacataggtgctagagaaagagacagtcctataagccctgcctggagcactctgcccacaggactcctgggaaggtgtcacttctaggaagtggccattggtccagaggcctcagcctgaccaaccccaggcagctaggcaatgagcagtacagggtgcctaagcaaggtccccatctgtgccctgcctgcccacagatgcccctcaggacgctgtcctgtcctccttccgggactccagggccagatccatggctgtgatacagtgcactgtggacagtgagccacctgctgagctggccctatctcatgatggcaaggtgctggccacgagcagcggggtccacagcttggcatcagggacaggccatgtccaggtggcccgaaacgccctacggctgcaggtgcaagatgtgcctgcaggtgatgacacctatgtttgcacagcccaaaacttgctgggctcaatcagcaccatcgggcggttgcaggtagaaggtgagtggaagagaggggaggaggaggggctctgatgctctcaggtccaagtccacgagaggggctggagctcccactagagcgggctgtctggtctgagaaagctctgccttgagaagcctaatctggtggagggggcacagctcccactggagggggcatggttccaccttggaaagccctataccaagtcagactgagaccttcccacaatgtgcagaggcccctcagaggtcccacccagaggctccagcccccaaggcctacagatccccaatcatctctctatcctccgcccgcaggtgcacgcgtggtggcagagcctggcctggacgtgcctgagggcgctgccctgaacctcagctgccgcctcctgggtggccctgggcctgtgggcaactccacctttgcatggttctggaatgaccggcggctgcacgcggagcctgtgcccactctcgccttcacccacgtggctcgtgctcaagctgggatgtaccactgcctggctgagctccccactggggctgctgcctctgctccagtcatgctccgtgtgctctgtgagtgtgaaccccctcctccgccttagtctccccacatctcacacgcccacctcagttcttcctcctcttctgtctgccaagagtgaaggcttcacggatattgagtcctgggttggaatcctggctctcccgctgtctggttgggtgaccttgtaaaatggggaatacatcattcgcctcatcctgcaagttgtataagaaataaatggctggtgcaggggcttatgcctgtaatcccagcactttgagaggctgaggtgggcggatcacttgaggtcaggagttcaagactagcctggtcaatatggcgaaactccgtctctactaaaaatacaagaattagcacggcatgaaggcacacacctgtaatcccagctattcaggaggctgaggcaggagactcacttgagcctgggaggtggaggttgcagtgagccaagatcaccacaacgcactccagcctgggtgacagactgagactctgtctcaagaaaaaaaaaaaaaaaagaaaagaaaagaagagaaaaaaccaaaagaaataaagcgtgctgagtgtgtctggcacacgataagccctcatcagtcttggtctcccactccagccttcaccaaggcctacactgtatcagtcagctattgctattgaccacaacaaaacttactgcttcaaacaaaagtcatgttatctgctcaattctgtgggctgggctcagctggggagttcttctgttgttcacacctcatgtggctgcagttgcccagtggtctcagatgactgcacgctcctggctgccagttgggccacatgtgcccagcaggctggcctgggcttcccacattgttgtgttccaacaagtagagcagaagctacaaggcctcttgaggtctggctctgaagttgcacaacatcacttctttcttcaattggtcaaactgagtcacagattcaaggagtgaggaaataggttctgcctcttaatgggaggagcagcaaagtcactgtgcatgggtacagggagggagaaatttgtggtcattgtctgcaatcaccacactcccttcctccccacagaccctcccaagacgcccaccatgatggtcttcgtggagcctgagggtggcctccggggcatcctggattgccgagtggacagcgagccgctcgccagcctgactctccaccttggcagtcgactggtggcctccagtcagccccagggtgctcctgcagagccacacatccatgtcctggcttcccccaatgccctgagggtggacatcgaggcgctgaggcccagcgaccaaggggaatacatctgttctgcctcaaatgtcctgggctctgcctctacctccacctactttggggtcagaggtgaggggagggggctccatctcccaggccactctgcacaaaagcccagctcttaggcccaaaggcttccttccctgtatccctcctgctgcagcatgatttgcctgtcgactctaaactgattgctcggggcacccttgtgtggagagcttcagcgataaagcaaaagttagaaggtgtcatcttgggtgggtccccttggaaggaagcactgggggcctgcagctgtggctgctctgagtcccgctctgtgttccagccctgcaccgcctgcatcagttccagcagctgctctgggtcctgggactgctggtgggcctcctgctcctgctgttgggcctgggggcctgctacacctggaggtgggtctggagctgggagtgggccagaagattggggtaaggcagcccacctcgtcttctccccaaattcccccaggtcctttaggacctcctattaagttcacaggctgcctacttcccagactgcccctccaaattggaaatcccttctagaattgtccctaaatcctccttgctgtagtttccttctttcctcctctctgccctggctgtgctaaagcaagggctagggaggaagacagaggaagcacccactctccatgaggttcccacgctcttgtggtctggagccagcctgtggggagcgggagaggaatgggggcaggaggtggggaggggagaggctctctgagtccactccgggccttgcagaaggaggcgtgtttgtaagcagagcatgggcgagaattcggtggagatggcttttcagaaagagaccacgcaggtatccattcaacacacacgggcagatataatacccagctaacccacagtgccaactggcatctggagactgctgtcatttagaggatggtgcctgggaccaaggggaggttggggagagtgtgcagggaaccaggagcccctcaggagataggagagccctgttctgctcggggcagagggaatccctgtgtcagctggcggctggcttagaggactaggggagactttctggacttggcagcatcccctccatttccaagacacgtatgttctgactcccccacctttgttctgaggcctcttccccactcccaagcctgcccgtcacctgggcagaagtgaaagtcagtttctcctcccctgtggtgtgtcccttctgcagctgattcacctggtaggccagggctccaagtcacacttccagccatgcacactcccaccaatcctcttgggaccccacctgaggctgggggcctgggggcctgccctggctcccagaggcctcctgtgaccagggttttctctgtgggaagctcattgatcctgatgcagccacatgtgagacctcaacctgtgccccacccctgggctgaccagtggtgttgcctgccctccggaggagaaagtggccagaatctgtgatgactccagcctatgaatgtgaatgaggcagtgttgagtcctgcccgcctctacgaaaacagctctgtgacatctgactttttatgacctggccccaagcctcttgcccccccaaaaatgggtggtgagaggtctgcccaggagggtgttgaccctggaggacactgaagagcactgagctgatctcgctctctcttctctggatctcctcccttctctccatttctccctcaaaggaagccctgccctttcacatccttctcctcgaaagtcaccctggactttggttggattgcagcatcctgcatcctcagaggctcaccaaggcattctgtattcaacagagtatcagtcagcctgctctaacaagagaccaaatacagtgacttcaacatgatagaattttatttttctctcccacgctagtctggctgttacgatggtttatgatgttggggctcaggatccttctatcttccttttctctatccctaaaatgatgcctttgattgtgaggctcaccatggccccgctttgtccacatgccctccagccagaagaaggaagagtggaggtagaagcacacccatgcccatggtggacgcaactcagaagctgcacaggacttttccactcacttcccattggctggagtattgtcacatggctactgcaagctacaagggagactgggaaatgtagtttttattttgagtccagaggacatttggaattggacttccaaaggactcccaactgtgagctcatccctgagacttttgacattgttgggaatgccaccagcaggccatgttttgtctcagtgcccatctactgagggccagggtgtgcccctggccattctggttgtgggcttcctggaagaggtgatcactctcacactaagactgaggaaataaaaaaggtttggtgttttcctagggagagagcatgccaggcagtggagttgcctaagcagacatccttgtgccagatttggcccctgaaagaagagatgccctcattcccaccaccaccccccctacccccagggactgggtactaccttactggcccttacaagagtggagggcagacacagatgttgtcagcatccttattcctgctccagatgcatctctgttcatgactgtgtgagctcctgtccttttcctggagaccctgtgtcgggctgttaaagagaatgagttaccaagaaggaatgacgtgcccctgcgaatcagggaccaacaggagagagctcttgagtgggctagtgactccccctgcagcctggtggagatggtgtgaggagcgaagagccctctgctctaggatttgggttgaaaaacagagagagaagtggggagttgccacaggagctaacacgctgggaggcagttgggggcgggtgaactttgtgtagccgaggccgcaccctccctcattccaggctcattcattttcatgctccattgccagactcttgctgggagcccgtccagaatgtcctcccaataaaactccatcctatgacgcaa

SEQ ID NO: 877 - DNA, 442 bp, Homo sapiens
agggtaactactgtcttgacttcgaacaccatagatttgatttgcctgtttttaaactttacttaagtagaatcacagagtgtgtacaatgactttggaaaactgtttgacaatatctattaaagctaaaatacccttgccctatgaacctgaaattccacccaccttgccaagggacaaaaagttcccctctaaatgcaccaggctgtcagggatgaagcgttggctttggggcccccattcacacacatgactttttccggggcacccaagcatcagcctgtcgtcaccaggtgccaccctggcgatctctgaaggctggagtcggagtgcctccctcagacatcctgttctgcgtcactccttgggagaagtcgtgtttacagatggtgggtgtcacccatgccaagcactcctaagggttaatgctcactggtttgcc

SEQ ID NO: 878 - DNA, 10236 bp, Homo sapiens
cgaggactctggttcctacaacttccgcttcgagatcagtgaggtcaaccgctggtcagatgtgaaaggcaccttggtcacagtaacaggtgataagtggggtggcctggctgccccccgggagggattcccaagctgcttctggaccccttggctctcagccccagcccttgtcctgaatctaaccccagccagtctcagcctctgttccagccccggcgtaggcccaggcctggttctcccttgtattcacccaagtggggctggagtagaaagcgtctttccttcccctaaaagccccctccccagggctctctcctcagctggggtttccagggcgagggatctcaggggtggcaaaagcgggtcctgagcactgctgtctctgtcctcagaggagcccagggtgcccaccattgcctccccggtggagcttctcgagggcacagaggtggacttcaactgctccactccctacgtatgcctgcaggagcaggtcagactgcagtggcaaggccaggaccctgctcgctctgtcaccttcaacagccagaagtttgagcccaccggcgtcggccacctggagaccctccacatggccatgtcctggcaggaccacggccggatcctgcgctgccagctctccgtggccaatcacagggctcagagcgagattcacctccaagtgaagtgtgagttgtctggggacacacccttgtggctgagcgcatctgttgctcctgacagaaaccagcccctctccagcccacagaaacggaacccttgctcctgatgcaaaaccaggctgctcctgggcctccagggtagggcaagtggagagacactgctgagccccaaggacttcgttaaatggttccctccacctcctactgcttcgaaggggcttgtccttgaggccaggctgggcagagaaagggagacacaaagggttggggaacaggagctcccatgcagcttcagggttggcagcaagtgccccgggatttaccccgtgctggaggatgctggggaggtgggatttatccctttcctgcctggctctgttttctcagtctatgacgaagataacaatagatggttcctgtctcacagatttatgataaaaattaaaggagatgggccgggcgcggtggcttatgcctgtaatcccatcactttgggaggctgaggcgggtggatcacttgaggccagggattcaagaccagcttggccaacatggtgaaacctcgtctctactaaaaatacaaaaattagccgggtgtggtggcatatgcctgtaatcccagttactaaggaggctgaggcactaggattgcttgaaccccgggggtggagttgtattgagttgtgattgtgccactgcactccagcctgggtgacagagtgagactgtgtctcaaacaaaaaacaacaacaacaacaaaaacaaataaaggagatgacccaggtcaaggatttagaagagtgcctggcacatattaaacacttgaggccggatacagtggctcacacctgtaaccccagtgctttgggaggccaaggcaggagaattgcttgaggcaaggagttcgagaccagcctgggcaacatagtgagaccctgtctctacaaaaaaattaaaaaacaaaaattagctggatgtggtggcttgcacctgtagtcccagttcctcgggaggctgaggcaggaggatcacttgagcccaggagtttcaggctgcagtgagctatgattgtgcctctgcactccagcttggctgactgagccagatcctctttctaaaaaaataagaataaaacacttgaatacacagagagaggctttggaacaagatttaaggaaatgcagttctttgtgttgttggcctcttgcttacaaactgggtaactattttcagagctagtttgatgctgcctttggccccctcccactaggtagttggtcccttaccaatagcttccacaggccactaaagctagcagtggggtacccatgaccctgtgtgtggagctcatcccaaatagagcaggagcaatggacagcattgggaagcagaaaactacagctggtggggtaggctggacgctggccaagcgtcacatgatcagctctcaatgggcataggaatgcatcaggcgcagggggcgggaaagggacggacatgggcagacagagcatgccctgggtgaggattgaaggggactgctgttttatctgggcatacttccttaggactgagcttttaaaggggggcaagaagaagtgtgccatcctctgccctccccaagcaccttacccaataccccctactgtgacttgcagatgcccccaagggtgtgaagatcctcctcagcccctcggggaggaacatccttccaggtgagctggtcacactcacctgccaggtgaacagcagctaccctgcagtcagttccattaagtggctcaaggatggggtacgcctccaaaccaagactggtgtgctgcacctgccccaggcagcctggagcgatgctggcgtctacacctgccaagctgagaacggcgtgggctctttggtctcaccccccatcagcctccacatcttcagtgagttcttgggaaggttgcgtattggccagagaatagggaggagctcaggcctcagggacggaggggagacagggcagggcagggccagcaactggcataacccagtgcttcctggatgcaggtgtggagtcccagccctgccttaccatgagacaggtgacaatacccccacgaagggtggggtgtcagggggatcctggtgagcaggacaaagagatgcagagcactccaggaggctcccctgtagcagcaggcgggtggtgtaggatgtgcagagattgaggctgattggctgagacccggggactgtatggggctggggctggaagttggctgggaccccccagcactccctatgctgcccttgcagtggctgaggtccaggtgagcccagcaggtcccatcctggagaaccagacagtgacactagtctgcaacacacccaatgaggcacccagtgatctccgctacagctggtacaagaaccatgtcctgctggaggatgcccactcccataccctccggctgcacttggccactagggctgatactggcttctacttctgtgaggtgcagaacgtccatggcagcgagcgctcgggccctgtcagcgtggtagtcaaccgtaagaggccagggtggggtggcactggacacagtcagagcaggaccagatggtggagccccaaggaagggttggggtcctgggcatgggaacttcaaggccacttacctggaggtggccttgagctcatgtcccagctctgcacacctgggcaatgctttgacctccctagttccctcctattttatatttggaagtttaaacttatgaaaagttgcagagaaagacaaataatgattatatacctttaacctagatttcccatttattaacattttggcacatttgcttaatctttctcgctgtctacacagacacacacacgcacatacatacatataaatgtatggatatagacttgcatatatacaggtgcacttgtgtgtatgcacatccactctatgtggacatgtgcacttatacatatatggacactctatatacatatgcatatgttatttatgtatctacctacatatttatattcctgaagttgcagacatgaggcttctttaccgctaaattcctaagatcattctcttacatatccacaatgcaatgatcatgatcaggaaaattagcattgatagaagacttttttttttttttgagatggagtctcactgtgttgcccaggctggagtgcaatggtgctatcttggctcactgcaatgtccgcctctggggctcaagcgattctcctcctgcctcagcctcctgagtagctgggattacaggcacccaccatcctgcctggctaatttttgtgtttttgtagagacagggtttcaccatgttggccaggatggtcttgaactcctgacctcacgtgatccacctacctcggcctcccaaagtactgggattacaggtatgagccactacacctggctgatagaagactgttatctaagctataatctatattcacattttaccagtggacctaatactgtcttttgtagccattttttttctggtccagaatacaatcacagttcacatattgcattgggtcgttgcgtctcttcattctccgttagtctgagactgttcctcagtctttccttgtcattcttgacattgaaacttgcagagtgcaggcctgctgttctgaggaggtccctcactccacatttgcctgacttgaatggcctgagaccatgccctctgggtgggaaggccgcggacatgctgctctgccctgtcaggaggcactctgtgtcagcttgtcccattgctgatgatgctcactttggtcacctggctgaggtgctgtccctcaccaggtctctctattagttttctcatctttgaagtggggcttttatccccacttgcagggtggccttgaacactgactgggacaacagagtgacgtacccagcccagccaaggacaaaagtgtattcagcaggcactcaggcactttgggatcacccccttctcacagggcagtgtgggacaaagcggtgcagaggtcacgggttgtatcagggtatccagggaatgcccttgtctgagggtgacaggcccacctctcgtctccacacagacccgcctctcactccagtcctgacagccttcctggagacccaggcgggacttgtgggcatccttcactgctctgtggtcagtgagcccctggccacactggtgctgtcacatgggggtcatatcctggcctccacctccggggacagtgatcacagcccacgcttcagtggtacctctggtcccaactccctgcgcctggagatccgagacctggaggaaactgacagtggggagtacaagtgctcagccaccaactcccttggaaatgcaacctccaccctggacttccatgccaatggtaagatgggcactggcagccagggagagtggagggagcctgaggaggagcctgctccagtctgttccttctagaagtctagtggactcaaccgcaggactgagctaactggctacgccacataaaagacaggggctgtgcagtgacccaacggcagagcttcctggaagtcaagggaaaaagggaaacacaacaggtcacatcattccttttgcacctaccctgaccctaaacttggagagtccctcagaagcattcattgttttttaattatgaaactctgggagcaggctctatgctagcagtcagatgtgggaagccaaatagaaaagtagggtcttctggctgggcgtggtggctcactcctgtaatcccagcactttgggaggccgaggtgggtggatcacgaggtcaagagatcgagaccatcctggccaacatggtgaaatcccatctctactaaaaatacaaaaattagctgggcatggtggtgagttcctgtagtcccagctacctgggaggctaaggcaggagaatcgcttgaacccaggaggtggaagttgtagtgggccaagatagcgccactgcactccagcctgggtgacaagagtgagactctgtctcaaaaaaaaaaaaaaaaaaaagaaaaagaaaaaagaaaagtacggtcttccaactttcggtatgtgcactgtccttccctcctcctgagggcatggtagctaattgatcaagccaggtttttctttttgttttttgagatagggtgttgctctgttgcccaggccggagtgcaatggtatgttcatggctcactgcagcctcaaactcctgggctcaagccatcctcccatctcagcctcccaaatagctgagactacggcccatgtcaccacacccagctaattaaaaaaaaaaaattgtggccaggcatggtggctcatgcctgtaattccagcactttgggaggccgaggcaggcagatcacctgaggtcaggagcttgagatcagcctggccaacgtggtgaaaccccgtctccactaaaaatacaaaaattagccgggtgtggtggcgcacacctgtggtcccagctactagggaggctgaggcaggataattgcttgaacctgggaggcagaggttgtagcgagctgagattgcgccactgcactccagcctggctgacggagcaagactccgtctcaaaaaaaaaaaaaaaaaaaaaaaaaaaaagctggccacagtggctcacacctgtaatcccagcactttgggaggctgaggcgggtggatcaccagaggtcgggagttcgagatctgcctggctaacatggtgaaaccctatctctactacatgtataacattagctgggtgtggtggcacacctgtaatcccagctacttgggaggctgaggcaggagaatcgcttgaacctgggaggcagaggttgcagtgagccaggatcacaccactgcactccagcctgggagacagagtgagactcagtctcaaaaaaaaaaaattgtttgagatggagtctcactatgttgcctaggctggtctggaactcctggcctcaaacgatccttctgcctcagtctcccaaagtgctaagattacaggcatgagctaccatgcccagccaagccaggtgttggacataagcctgggctctggctctgaatcttcaaccatgctgcagccatctactaccaatagatctgatttggcattaaagggcaaaccctcctgatgcaccacaaagcccagagctacctacagtagtgtggggaaaggagaaccctggaaggctttctatatagggcagcatgtggggttgagaggagggacccttcccagcctcttcctctccccgcagccgcccgtctcctcatcagcccggcagccgaggtggtggaaggacaggcagtgacactgagctgcagaagcggcctaagccccacacctgatgcccgcttctcctggtacctgaatggagccctgcttcacgagggtcccggcagcagcctcctgctccccgcggcctccagcactgacgccggctcataccactgccgggcccgggacggccacagtgccagtggcccctcttcgccagctgttctcactgtgctctgtgagcagccaccacctgttgcagcctcctgccgggacccaccagccaccccacctcctctaggccccccagccctgtcctgccctgccccacggtctatatcgggagggctgggtcacagacctggccacagtgggtctttccatgtggggctgaagtttaggaaatgaggctggggccttctctacctccccatgtctttaccctccaatgccagccctgtgggctcctctgtcccagcctcaagctcagcatgggcaccacatccatgctttgtcctcatgggtgagccctgggacaccacactcctctatttgtgcacatgccccacaggctgtgctgggctcccatagacaccaaggcaaagcccctcagcacagggacagacagcccctctgcatccgccaagcggggaggctccgtgtaagaccaagggcctgattccagaggcttcccctgacacatgtgtgccggagccacgtcccggaactgtcagagggcagctgcctctgcaaagttttctggtgtctgagtgagatcacatgggggccttggctgattgctctcttttggccaactgtctccagaagccttcaggaagaggccattctatgcattcgctagtatcacaggagctggcttggagatcacagataagctgcagggcagatcttgaggggaggctccgtggtaaggcattgggtgcagggtgggagcagacagcatgacccccagggattgctaggtgggcaccctgctcagcagcagatgggacttatgcaaggtggcagccagcccatacagcacctttgtctgagctagaaaatggtgctccttcttctgggaagactcagtaggcatcagggcacagcttagcttgaggagcatgagcctagcttgagttccacccaccctggtctggctgcccttgtgcagtgcacagtctgcacagctgcttggggcagccttcgggatctgcctttgtccagtgtattctgggagcctagccaggcttgtggggccctggagcatccgtgggatgagtgcccatgttcttcctccctgcagacccccctcgacaaccaacattcaccaccaggctggaccttgatgccgctggggccggggctggacggcgaggcctccttttgtgccgtgtggacagcgacccccccgccaggctgcagctgctccacaaggaccgtgttgtggccacttccctgccatcagggggtggctgcagcacctgtgggggctgttccccacgcatgaaggtcaccaaagcccccaacttgctgcgtgtggagattcacaaccctttgctggaagaggagggcttgtacctctgtgaggccagcaatgccctgggcaacgcctccacctcagccaccttcaatggccagggtgagtcaggcagggaatgggtggcctgggggcaggggctggagctctggactgttctgctccgaggaggatctaatcaggcaaaaccactctgtgcagcagtgggggcccttcgctgccctcctccacattcaggaagagcggagctgctccttcccatgatctctgttcaggccggggataggcaacacagctggtctctgaggaaggactccccagctgggacagttgggctgccttgtcctccttccctgtactgcaaccctctctgcccagggcccccacagtccccagggcccacttctcctaggctgccctgtgagctagcttgcttttctccccaaccctgtgggcaccccagggggcctccttcctgctccttccaggctgggcggctggacccctggctcctgggggccgggggtggtcagtaagctgtgccgcctgctctccagccactgtcctggccattgcaccatcacacacacttcaggagggcacagaagccaacttgacttgcaacgtgagccgggaagctgctggcagccctgctaacttctcctggttccgaaatggggtgctgtgggcccagggtcccctggagaccgtgacactgctgcccgtggccagaactgatgctgccctttacgcctgccgcatcctgactgaggctggtgcccagctctccactcccgtgctcctgagtgtactctgtgggtgactggcatgggcagcctggggacttggagggtggaggggtggtctggggagaagcaggggccgggctggggtttggggaggaaagagcatggcttaggctgtgtgtgtggcaggaggtgggggacatagtgtggcagttgtaatgtggtgagctaggctgggtggcctcagctccctctgttcctgcagatcccccggaccgtccaaagctgtcagccctcctagacatgggccagggccacatggctctgttcatctgcactgtggacagccgccccctggccttgctggccttgttccatggggagcacctcctggccaccagcctgggtccccaggtcccatcccatggtcggttccaggctaaagctgaggccaactccctgaagttagaggtccgagaactgggccttggggactctggcagctaccgctgtgaggccacaaatgttcttggatcatccaacacctcactcttcttccaggtccgaggtgagtgtcagtcttctgaagatatggtagactctgatgccctggggactactctggtcagactttgggctgggtgctgtgaattttgtgcagaaatatgtctttttcagtcctggtaagggcagtttccagccagcagaaggcctccctttgcctccagctagatattttcacctgtaataactgcagcagccactaggaggcaatggcaattcacagagtggcttgcttggtgggagcactttctgaaataacttgttttgtgatcatataattttgttacatagtaaacattctcatacatatgtatatttatattatgcatatatgtttatgtatgagtatatacacatacaaatatacattatgtgtattcttatgcataa

SEQ ID NO: 879 - DNA, 8269 bp, Homo sapiens
cagaccccaatatttggagcagaaccccaagatttgacatctaaaacctcaagcctggagctgaactctgaattctgggcctgggaccttgaaatctgggactggatttccagtactgtaccctggaacccactcttggggacctgaaccctgggattcaggcctcaaattccaagatctggactgtgggattccaaggggcctgaacccgagtttgggcctgaagtccttgctgcagacctgagtgcttaaatctggggcttgagacctcccaatcttgactcagcaccccaatatctgaatgcagaaccccgggatcggatctcagactctaaaccccaccgtttggctgcttagcatcccaagactggacctgggagaccctgaccctgaacaacccaaactggacccgtaaaactggaccctagaggcccaatatttaggggtctggaaccccgagtattaaggtctggagactccgttgccacagatttgagccgagtcaggacacagtccctctacagaagccttggggacaggaaaagcatgaccagatgctccctccagagccctgacctctgactcccctggagctaggactctgctccctggggctgcttctagctcaggtaaggctgctgaaacctcaaggtggggacgggctgggaggagcattgtggctgcgggttacggtaccaggtaccctttgacactcttggggtttctccagaaaaaaagacattcccccatgggtctgccttcagctcctgctctgctccaaacactctctggacactggccatccttgcccctctctgaccttccctgcctcagttgatgggacctccaggtctctgacccctgcaacccttacagcctttcgctgtctatccggtccgaccgtctccgccacctctcttgtccaccactcctctctctgggctcctttctccacctgtcctctcaatggccatctctgttccctttttctctctctgatcatctttgtgacacccctgtccacaggtcctctctccagtcgcctctgcctgctgcttctcagtgaccatcgctgacatctgtgtccactgtgcctctctctaatcatcattcaccagctctcttgctccttctccacccctgaatctaagcctaggtctgtgaccgtccccatccatctttgacattgctgtccaccactcttctctccagcagcctctgtccatctctcctctctagcttcctctggccacctttccctttctctggccatctctcccactgctcttgccctcctcccacccctgaccctaactcccagtctgcaactgtctgaccatctctggccacctctcctctctctctcactcactgatgccctctgatcatctctggccacctcttctctctctctcactcattgatgccctcttgatcatctctggccacctcttctctctttctcactcactgatgccctcttgatcatctctgcccacctcttttctctcgctcgctgatgccctctgatcatctctggccacctcttctctctctctcactcactgatgccctctgataatctctggccacctctcctctctcacttgctgatgccctctgatcatctcgaacatctctgctgcctttcctctctccgatgacctctccccgcaccatcctcctgagcagctgtcctgggctcccactgactctgccatgtctgtccttttcctcctctctgaccaccttgctggctttgggccgtttctgaccacgtgtctctgacatggtcatctcccccagatctgagcccaacccatgccctcccttctctttgtccactgctcatcttcctgaccatctgtaaccccttctcttctctggtcatatctgaccacttctgatcattgttgccaccctggctgccccgtctccccatggccagcttttaccatctctgaccacgtctaaagccctctggttttcctgccactcacccagaccagctgtcatttctctgaccatttctttacttttttcttttggagagacagagtcacgctctgttgcccaggctggagtgtggtggcgcaatcatagctcactgcagcctcaaattcttgggctcaaattgatcctcccacctcagtgtcccatgtagctaggaccacaggtgggcgccaccatgcctagctaatttttaaaaatttttgtataatagatacacggtctcactttgttgcccaggctggtcttgaactcctggcctcaagccatcctcctgcctcagcctccccaaatgctgggattacatgtgtgagccaccgcgcctggccttcctctggcttttggtcacatctgacggtctttgaccagcccttctgccctcagcccactgtgaccttctctcctggtctcagaccacccccagcccctgcagaacccctcttctgccctcacgcctcccctcttctccgcaggacacccctgcccgcgatggccatcctcccgttgctcctgtgcctgctgccgctggcccctgcctcatccccaccccagtcagccacacccagcccatgtccccgccgctgccgctgccagacacagtcgctgcccctaagcgtgctgtgcccaggggcaggcctcctgttcgtgccaccctcgctggaccgccgggcagccgagctgcggctggcagacaacttcatcgcctccgtgcgccgccgcgacctggccaacatgacaggcctgctgcatctgagcctgtcgcggaacaccatccgccacgtggctgccggcgccttcgccgacctgcgggccctgcgtgccctgcacctggatggcaaccggctgacctcactgggcgagggccagctgcgcggcctggtcaacttgcgccacctcatcctcagcaacaaccagctggcagcgctggcggccggcgccctggatgattgtgccgagacactggaggacctcgacctctcctacaacaacctcgagcagctgccctgggaggccctgggccgcctgggcaacgtcaacacgttgggcctcgaccacaacctgctggcttctgtgcccgccggcgctttttcccgcctgcacaagctggcccggctggacatgacctccaaccgcctgaccacaatcccacccgacccactcttctcccgcctgcccctgctcgccaggccccggggctcgcccgcctctgccctggtgctggcctttggcgggaaccccctgcactgcaactgcgagctggtgtggctgcgtcgcctggcgcgggaggacgacctcgaggcctgcgcgtccccacctgctctgggcggccgctacttctgggcggtgggcgaggaggagtttgtctgcgagccgcccgtggtgactcaccgctcaccacctctggctgtgcccgcaggtcggccggctgccctgcgctgccgggcagtgggggacccagagccccgtgtgcgttgggtgtcaccccagggccggctgctaggcaactcaagccgtgcccgcgccttccccaatgggacgctggagctgctggtcaccgagccgggtgatggtggcatcttcacctgcattgcggccaatgcagctggcgaggccacagctgctgtggagctgactgtgggtcccccaccacctcctcagctagccaacagcaccagctgtgaccccccgcgggacggggatcctgatgctctcaccccaccctccgctgcctctgcttctgccaaggtggccgacactgggccccctaccgaccgtggcgtccaggtgactgagcacggggccacagctgctcttgtccagtggccggatcagcggcctatcccgggcatccgcatgtaccagatccagtacaacagctcggctgatgacatcctcgtctacaggtgcagggtccaggcactggggtagcttgggtgggggagtgaggcaaggggagggttgagggtacacctactaataccctacaccgaagcacaactgataagtgatgctggaaggttccaaaagaaatcagagagcaaaagtaaaagaaatcaggcagcaaggataacaagactctggcagaaagggtcaatgaaatctgacagcagtgataaaaagaagtcagacaagaaggacgaagtaaatgagacagcaaatgttaaaatatatcaggctacagggctaaaaaagatcaagcaataaggataaacgaaatcaggctgcatgagtaaaaagaaattaggcagcaagaataaatagtagtagcaaacataaaaaggaaaccaggcagcgggaggagaaagtaatcagggcagaagaataaaatgttaatgggcaagggtgggtggggaagataaggggataaaaataaatttaagttgtaaagataaagagagaaacaccaggttttccagatgacaggactagatactagctgggctgcaggaagaaaaggagatcaaacaggaaagcacagggagcccagaaacaatgaaataagcagctctgttagaaaaagaaatcagaccagaggttagaaggaaattgcagggaggaggttcgatagagactgggcttcggtgtgtgtggtgtgaactattccatgtttcaagttctaatatagtgacatccagatttttttttttttgagacagggtctcactttgtcgcccaggctggagtgcagtggtgcaatctcggctcactacaacctccacttcccgggttgaagcgattcttgtgcctcagcctctcgagtagctgggattacagacgtgcaccagcacgcccagctaatgtttgcattttatttttagtggagacggggttttgccatgttggccaggctggtctagaagtcctgacctcaggtgatccacctgcctcagcctcccaaagtgctgggattacaggcgtgaaccaccacacccagtgtagattttttcttttctttttttttttgagacggagtctcactctgttgcccaggctggagtgcagtggcacaatcttgactcactgcaagctccgcctcccaggttcatgccattctcctgcctcagcctcccgagtagctgggactacaggcgcccgtcaccatgcccggctaattttttgtatttctagtagagatggggtttcaccatgttagccaggatggtctcgatctcctgacatcgtgatccacccgcctcggcctcccaaagtgctaggattacaggcctgagccaccgcgcccgacagattttttattttctaaatcaaatcaaacctagttcaagttccttttgccaggtaaacagaaatatccagtttgccacacttgtgggggattctcttctctctcctgttgttgcaaacacagaacctggggtttacacactccaagaggtggctcagtccaacttgttcccccaagctggagagcactcagcacatctgcagtgaccgcatgtggtcagcagtggtggctgctgacctaggtgctgttgacacctcttaccaaagtccaaccttgcatggatggactgcggctgtgggtgagtccctgtcctcacggccaggctgggccaagggtgcagccccaaggctgactgtaaagactggacctccccagggttgaggactgttccttggggacctagtagtacctggatgtcctttccctcccttggggccaacacctcaagaaaaggccacttgatttccatttcagtcctggcaacccactgagctcattctactccctttctcagacatgactcggaagattgcacggaagtcctgcccctgaaaatcacacaagtcggccaggcgcggtggcttaacccctataatcccagcactttgggaggccgaggcaggtggatcaccaggtcaggagtttgagaccatcctggctaacacggtgaaacctcgtctctactaaaaatacaaaaaattagctgagtgtggtggcacgcgcctgtagtcccagctactcaggaggctgaggcaggagaattgcttgaacctgggaggcggaggttgcagtgagccgaggctgtgccactgcactccagcctgggtgacagagtgagactccgtctcaaaaaaaaaaaaaaaaagtcacacaagtcctggccaccttgccaggtggggaatgggatgaatgctgtcctagacagtcaccctgccccaggcggccacggagttccctgtacctctctcattagaatagcctaggaataaaacaggtgataagtcaactctccaacagggtgcccaactacaaaagaaactatagtgaaattgggtggtaaggattaaaaggaaacaagaaagaaaaagataaatagaaaccagccaacagagataaaagagaagcaggtgacagagccggaaagaaataaggcaacagggagaaaaagaaagcagtagtgacggaggcacattagtttaatgaaaagggaatcagacgacaggactcattggaaaacaggctatcaatacagtcatcataataaggcaatagggctagggggacatttattggcaggttacaaggaaatcgggcaacaggggtacagggagatcaggtggtttgattggagagaatcctagctgtacactagaggaaaatcaggcagctggaaaagggaaatttggcataggctgcaggaaataggggaaccagagggaaattggcaagcgtctggaggagactgggaggtaaaatgtgggggaaattggatgggggtggctagaagacaaaaggattaaattagatggaaattggacagggttagagcagaattgggtggtgaactggagagatgactggcagtgggaccagagtgaaatcaggcagaggattggggcaaaattgggcagggaggctagagcggagctgggctgcaggctggagggaaattgagtgggcagtgcaaaagggaaattgggcagttgggtataaaatgaaaccggcaaggtgtggtggctcacgcctgtaatcccaacacttaaggaggccaaggcaggaggctggactgccttgaggccaggagtttgagaccagcctgggcaatatagcaagagcctgtctctacaaaaaatttaaaaattagctgggcatggtagtgcacacctgtagttcctgctactcaggaggctgaggccggaggatggcttgagtccaggagtcagaggctgcagtgagctgtgatcatgccactgcactccagcttgggcaacagagcaagaccctgtctataagaaaacagaaagaaagaaagaaaagaaacaggatggattggaagaactcacgtggtgagctgttagagaaattgggtggtgggactagagtgaaaatgggcagcaggctatgaggacgtgtgagagggtgggctagagtgaaattggccaacagactggaggggtatcagtcaggtggctgaatgggatgtcagaccaaagggaattgggatgttggtgagagggagctcattgggtagaatgaaatgaaggagtggactggtgggaagtctagccccgcagggagtttggtgggggaagcacaggttgggggctgggcagcctgagacctgacccccacctgcctgccctgcaggatgatcccggcggagagccgctcgttcctgctgacggacctggcgtcaggccggacctacgatctgtgcgtgctcgccgtgtatgaggacagcgccacggggctcacggccacgcggcctgtgggctgcgcccgcttctccaccgaacctgcgctgcggccatgcggggcgccgcacgctcccttcctgggcggcacgatgatcatcgcgctgggcggcgtcatcgtagcctcggtactggtcttcatcttcgtgctgctaatgcgctacaaggtgcacggcggccagccccccggcaaggccaagattcccgcgcctgttagcagcgtttgctcccagaccaacggcgccctgggccccacgcccacgcccgccccgcccgccccggagcccgcggcgctcagggcccacaccgtggtccagctggactgcgagccctgggggcccggccacgaacctgtgggaccctagccaggcgcccccccctctaagggtcctctggccccacggacagcaggacccggacaccctgtgggacctggcctcaaactcaccaaatcgctcatggtttttaaaactctgatggggagggtgtcggggacaccggggcaaaacaagaaagtcctatttttccaagcttgggcgaa

SEQ ID NO: 880 - DNA, 336 bp, Homo sapiens
tttgaagctatggcattcccccactatgagcccacctgtcagccaggctatctgccttgatcctagatgaagtggccattctgcctgcccctcagaacctctctgtactctcaaccaacatgaagcatctcttgatgtggagcccagtgatcgcgcctggagaaacagtgtactattctgtcgaataccaggggtgagttttttcttttaatagttcttctcccttaagcagaagttggttcctgaaggcatagcccttcctcctgagcccaaggtggctttttgagtccagggatagattatccccaaagatctacccactctgtctgcataggc

SEQ ID NO: 881 - DNA, 336 bp, Homo sapiens
tttgaagctatggcattcccccactatgagcccacctgtcagccaggctatctgccttgatcctagatgaagtggccattctgcctgcccctcagaacctctctgtactctcaaccaacatgaagcatctcttgatgtggagcccagtgatcgcgcctggagaaacagtgtactattctgtcgaataccaggggtgagttttttcttttaatagttcttctcccttaagcagaagttggttcctgaaggcatagcccttcctcctgagcccaaggtggctttttgagtccagggatagattatccccaaagatctaccccctctgtctgcataggc

SEQ ID NO: 882 - DNA, 3284 bp, Homo sapiens
gcgcaccctggagcgcagcgactcgccgccggcgcccctgcggccctgggtgcccctgcgcaaggcccgctctctggagcagcccaagtcggagcgcggcgcaccgtggggcacccccggggcctcgcaggaagaactgcgggcgccaggcagcgtggccgagcggcgccgcctgttccagcagaaagcggcctcgctggacgagcgcacgcgtcagcgcagcccggcctcagacctcgagctgcgcttcgcccaggagctgggccgcatccgccgctccacgtcgcgggaggagctggtgcgctcgcacgagtccctgcgcgccacgctgcagcgtgccccatcccctcgagagcccggcgagcccccgctcttctctcggccctccacccccaagacatcgcgggccgtgagccccgccgccgcccagccgccctctccgagcagcgcggagaagccgggggacgagcctgggaggcccaggagccgcgggccggcgggcaggacagagccgggggaaggcccgcagcaggaggttaggcgtcgggaccaattcccgctgacccggagcagagccatccaggagtgcaggagccctgtgccgccccccgccgccgatcccccagaggccaggacgaaagcaccccccggtcggaagcgggagcccccggcgcaggccgtgcgcttcctgccctgggccacgccgggcctggagggcgctgctgtaccccagaccttggagaagaacagggcggggcctgaggcagagaagaggcttcgcagagggccggaggaggacggtccctgggggccctgggaccgccgaggggcccgcagccagggcaaaggtcgccgggcccggcccacctcccctgagctcggtaaggcctcagggagggctgacaaggtgcctgaacccccgtcggggggcgtttgtggagagcaagactgctcagcaggagccggggggtcgggggtttcgcctggggctgctagccagctgcaagggtgggtttgccaaagaaggcacagacacaggctcgactttgagtgaaggattgtcaaagtccttgtgctaggactgctactggtgaggcagagcgtgagtgttgtgatggaggctaggtgaggctgagatgtgagctaagactggtgcccagatgcccgccatagctcccctgggtccagtggcctgctaggctgttggatcaagaaccactactggggggatgcactggtgggaacctaaggacccccctccatacccccaatccctctgttggggagagatggtagatggtctgaaataattttcaaatccctgttacagacacgctttgtgccagataactctttactctgcctctcccacccgggcaccatcccctgacccatgtgtggccacccagcctgcccttctagcctcctcacctcaggcttacaccccgcatggctgagctcactgtggtccctacacaatgcctgcctgtgtgttgtctcccaaccttcccatggatgatgaccaacaccaccaacaggagaatggctctgcaccccacccctcatcctgcacatcaactcgaggcccactcctggagagaggcagaggaaggcgtccttgacccacttccactgctcctccagaatagatgcctctacctgctgctcctgggagaccctgccaggatctctttcattgcacttaccatactgtatttttcttcatcaaaattattttgcatttaagtattaccaccttagaatctttagagataattaggcccctgtccatcatcctcctggacaccattattgcaaacacacaactatgtgccagcattgtgttaactaggcccttacagatgttatttcatttcagcctatatgtcagtttcagagggtcttttcccctccatcttacagataacaaaactgaggctcagagaggctaatttgcccaaggttttgtagctaggaaacagcagaattgggattttcactgctttttttggctatgtacattgtcctttatctagcttatggaatgtcagagttggagaatgcccagagacccatgacagtggagtttgtcatctctctgtatgtatgagcttcctgtaagcagggaccactggtccttcctctagtgttcttggtacccatacagtactcagtatgccgggagtacagggtcactatttggtgaacggatgaaatcaaatctgatcttcgtaggcctctcagactgcctaccattcactcttttgaatctgacggcttcacacatttgacaattcacctcgtgttgctctgtgacaccgctgttattgcttaagtcttgggttgcttttagcttgttctttgtctgtttgaaagcttgtgcccctccaggtgccttgcatggggcctggtacgccatacatgatggctgacgtgttaaagacatacacagtgcagtcctgtctttctccagaagccaacgctctaattgtggatgaagttgaggaacggccacactaacatggagtcaaggctgccctgacctgtttcgagaatgctccttctgacttccttttttccctaaggacattcaggaggcagaccctcttctccccaagtccctgctttctagaagcccctctgtctgggtttggctttctaggatgcaggccaccaggactctctctcccgctgtcatccctgcagggatcatggccccttaccccgttattcctgtgtccggcagagtcttcggatgactcctacgtgtccgctggagaagagcccctagaggcccctgtgtttgagatccccctgcagaatgtggtggtggcaccaggggcagatgtgctgctcaagtgtatcatcactgccaaccccccgccccaaggtgagctccagcactgggccaaggtgcggtcgaggttgggagggggtgtgtgagaagggaaggggaggttcccccggactcctccaagggaggggtgggaaagaggggaattatcccctccacgggggctgccctgacttgggtgtgtgttcagggacatttctcaggacccccgagagaagggagggcaacctgagcttcccaaaatgagggcggactcttccagattccctggggtgctgagaggagaggtttggtctcctgtgtggtgtgtggggtaggagtagagattctcagtgggcgcctgtgggccgtggcgagccgggtccctgtgcctccccacagtgtcctggcacaaggatgggtcagcgctgcgcagcgagggccgcctcct

SEQ ID NO: 883 - DNA, 3283 bp, Homo sapiens
gcgcagcctggagcgcagcgactcgccgccggcgcccctgcggccctgggtgcccctgcgcaaggcccgctctctggagcagcccaagtcggagcgcggcgcaccgtggggcacccccggggcctcgcaggaagaactgcgggcgccaggcagcgtggccgagcggcgccgcctgttccagcagaaagcggcctcgctggacgagcgcacgcgtcagcgcagcccggcctcagacctcgagctgcgcttcgcccaggagctgggccgcatccgccgctccacgtcgcgggaggagctggtgcgctcgcacgagtccctgcgcgccacgctgcagcgtgccccatcccctcgagagcccggcgagcccccgctcttctctcggccctccacccccaagacatcgcgggccgtgagccccgccgccgcccagccgccctctccgagcagcgcggagaagccgggggacgagcctgggaggcccaggagccgcgggccggcgggcaggacagagccgggggaaggcccgcagcaggaggttaggcgtcgggaccaattcccgctgacccggagcagagccatccaggagtgcaggagccctgtgccgccccccgccgccgatcccccagaggccaggacgaaagcaccccccggtcggaagcgggagcccccggcgcaggccgtgcgcttcctgccctgggccacgccgggcctggagggcgctgctgtaccccagaccttggagaagaacagggcggggcctgaggcagagaagaggcttcgcagagggccggaggaggacggtccctgggggccctgggaccgccgaggggcccgcagccagggcaaaggtcgccgggcccggcccacctcccctgagctcggtaaggcctcagggagggctgacaaggtgcctgaacccccgtcggggggcgtttgtggagagcaagactgctcagcaggagccggggggtcgggggtttcgcctggggctgctagccagctgcaagggtgggtttgccaaagaaggcacagacacaggctcgactttgagtgaaggattgtcaaagtccttgtgctaggactgctactggtgaggcagagcgtgagtgttgtgatggaggctaggtgaggctgagatgtgagctaagactggtgcccagatgcccgccatagctcccctgggtccagtggcctgctaggctgttggatcaagaaccactactggggggatgcactggtgggaacctaaggacccccctccatacccccaatccctctgttggggagagatggtagatggtctgaaataattttcaaatccctgttacagacacgctttgtgccagataactctttactctgcctctcccacccgggcaccatcccctgacccatgtgtggccacccagcctgcccttctagcctcctcacctcaggcttacaccccgcatggctgagctcactgtggtccctacacaatgcctgcctgtgtgttgtctcccaaccttcccatggatgatgaccaacaccaccaacaggagaatggctctgcaccccacccctcatcctgcacatcaactcgaggcccactcctggagagaggcagaggaaggcgtccttgacccacttccactgctcctccagaatagatgcctctacctgctgctcctgggagaccctgccaggatctctttcattgcacttaccatactgtatttttcttcatcaaaattattttgcatttaagtattaccaccttagaatctttagagataattaggcccctgtccatcatcctcctggacaccattattgcaaacacacaactatgtgccagcattgtgttaactaggcccttacagatgttatttcatttcagcctatatgtcagtttcagagggtcttttcccctccatcttacagataacaaaactgaggctcagagaggctaatttgcccaaggttttgtagctaggaaacagcagaattgggattttcactgcttttttggctatgtacattgtcctttatctagcttatggaatgtcagagttggagaatgcccagagacccatgacagtggagtttgtcatctctctgtatgtatgagcttcctgtaagcagggaccactggtccttcctctagtgttcttggtacccatacagtactcagtatgccgggagtacagggtcactatttggtgaacggatgaaatcaaatctgatcttcgtaggcctctcagactgcctaccattcactcttttgaatctgacggcttcacacatttgacaattcacctcgtgttgctctgtgacaccgctgttattgcttaagtcttgggttgcttttagcttgttctttgtctgtttgaaagcttgtgcccctccaggtgccttgcatggggcctggtacgccatacatgatggctgacgtgttaaagacatacacagtgcagtcctgtctttctccagaagccaacgctctaattgtggatgaagttgaggaacggccacactaacatggagtcaaggctgccctgacctgtttcgagaatgctccttctgacttccttttttccctaaggacattcaggaggcagaccctcttctccccaagtccctgctttctagaagcccctctgtctgggtttggctttctaggatgcaggccaccaggactctctctcccgctgtcatccctgcagggatcatggccccttaccccgttattcctgtgtccggcagagtcttcggatgactcctacgtgtccgctggagaagagcccctagaggcccctgtgtttgagatccccctgcagaatgtggtggtggcaccaggggcagatgtgctgctcaagtgtatcatcactgccaaccccccgccccaaggtgagctccagcactgggccaaggtgcggtcgaggttgggagggggtgtgtgagaagggaaggggaggttcccccggactcctccaagggaggggtgggaaagaggggaattatcccctccacgggggctgccctgacttgggtgtgtgttcagggacatttctcaggacccccgagagaagggagggcaacatgagcttcccaaaatgagggcggactcttccagattccctggggtgctgagaggagaggtttggtctcctgtgtggtgtgtggggtaggagtagagattctcagtgggcgcctgtgggccgtggcgagccgggtccctgtgcctccccacagtgtcctggcacaaggatgggtcagcgctgcgcagcgagggccgcctcct

SEQ ID NO: 884 - DNA, 176 bp, Homo sapiens
cttggttctgcagcagcgtccctcagagcgggttgcgcagggaggagcccgaccttcagcctcaactggccagcgaagccccacgccgccctgcccagccgcctccttccaaatccgcgctgctccccccaccgtcccctcgggtcgggaagcggtccccgccgggacccccggcc

SEQ ID NO: 885 - DNA, 348 bp, Homo sapiens
cggaaactgattgactgcaaagctgaaggcatccccaccccgagggtgttatgggcttttcccgagggtgtggttctgccagctccatactatggaaaccggatcactgtccatggcaacggttccctggacatcaggagtttgaggaagagcgactccgtccagctggtatgcatggcacgcaacgagggaggggaggcgaggttgatcgtgcagctcactgtcctggagcccatggagaaacccatcttccacgacccgatcagcgagaagatcacggccatggcggccacaccatcagcctcaactgctctgccgcggggaccccgacacccagcctggtgtggg

SEQ ID NO: 886 - DNA, 9656 bp, Homo sapiens
ccgaataccaggatacaacggtttgaggttctcaagaacggtaccttagtgataaggaagtttcaagtgcaagatcgaggccagtatatgtgcaccgccagcaacctgtacggcctggacaggatggtggtctttctctgggtcaccgtgcagcaacctcaaatcctagcctcccactaccaggacgtcaccgtctacctgggagacaccattacaatggagtgtctggcgaaagggaccccagccccccaaatttcctggatcttccgtgacaggagggtgtggcaaactctgtcctccgtggagggccggatcaccctgcaccaaaaccggaccctttccatcaaggaggcgtccttctcagacagaggcgtctataagtgcgtggccagcaacgcaacccgggcggacagcgtgtccatccgcctacacgtggcggcactgccccccattatccaccaggagaagctgtagaacatctcgctgcccccggggctcagcattcacattcactgcactgccaaagctgcgcccctgcccagcgtgctctgggtgctcggggatggtacccaaatccgcccctcgcatttcctccaccggaacttgtttgttttccccaacgggacgctctacatctgcaacctcgcgcccaaggacagcgggcgctatgagtgcgtggccgccaacctgatcggctccgcgcgcagtacggtgcagctgaacgtgcagcgcgcagcagcgaacgtgcagcgcgcagcagcgaacgtgcagcgcgcgccaacgcgcgcatcacgggcacctcctcgcagaggacggacgtcaggtacggagggaccctcaagctggactgcagcgcctcgggggatccctggccgcgcatcctctggaggctgccgtccaagaggacgatcgacgcgcttttcaggtaggcagctccgcgtggcttcctgtaaatcgctgggctggtggccccaacgaatataagtccttgttcaggatgaatatgcacacacattggtccctgcgtgcgataaaattaaatgaaattaattagcaggacacggtggctcacgcctataatcccagcactttggggccaaggcgggcggatcagttgaggtccggagttcgagaccagcttggctaacatggtgaaaccctgtctcaacaaacatacaaaaatttgccggacgtggtggcgagcgtctgcagtcccagctcctcgggaggctgaggtaagataattgcttgaacccagaaggtggcggttgcagtgagccaagatcacgccactgcacgccagcctggacgacagactgacactctatctaaaaatataataagttaattaattaagttgagacagggtgttgctctgtcacccagactgcagtgcagtggtgcgatcatacctcactgcagcctcaaactcctgggctgaagcgatcccctgagtagctgggattacaggtgtgcaccatgaggcacgactcttcttcttcttcttcctcttctccttcttcttcttcctcttcttcttcttttcttctttcttcttcttcttcctcttcttcttcctctccttcttctccttcttcttcttcctttcttcttcctcttcttcttcttttctttctttctttttctttcttcttctttcttcttcttcctcttctttcttcttcttttcttctttcttcttcttctccttcttcttcttcttcttcttcttcttcttcttcttcttcttcttcttcttcttctttcttctctcttcctcttcctattcttcttcttctttcttcctcttcctcctcttcctcttcctcttcttcttctttcttcaatttatgtagagatgggatctgctatgttgccaagtatgatcttgaacacttaacctcaagcagtcctcctgccctgacctaccaaagtgctgagatgacaggcttgagccaccgcgcctgaccctgtgtgtgatttttatgcaatgacattttgtatctctaaacttggatctacaacgaatgcttaacttcctcttaacaaatacttaacttcctcctctcttgtcccattcaaaaaaaaaaaaaaaggaaaaaaataaatcaagaaactgttgttttaatgattatatgtttaactataatgttagggcaaacaattcagcttgcttctatttccattgtagatttcaacaatatacatagatgtgttaggctttattttaatatggcattattggtacaatcaaagtgtacacattgttttaaaagcatcattaccacaccaacatagtgcacttgaaatgatacaaatgtacttgggctatgaagaaagccaccttctaatcaagtaccatcagttcccagatatacaggtttatggcagtgcttttcaaccaagggtgattttgccccaggacaacccttggcaacatccgaagacacctttgattatcacaaatggggcggtgggtgcttctggtatctggtgggtggagcccagggacagtgctcaacaccttgcagtgcacaggatggcccatcacagatagtcatccatcctaccttcaatgtccatagtgccgaggtcaagttactctgtcttagcaggaaagattctatctatctatctgtctatctatctatctatctatctatctatctatctatctatctaatctataatctatccatccttctacctatttcatctatcttctatctatctatctatctatctatctatctatctatctatcatctctctgtctatccatccattatctatggcagtcgtttgcaaccaggcatcaggtgttccttagtccctaggggacacttggtgatgtatggagacatttttggtcatcatgactctggggtggagggtgtgcttctggtatctggttgctgcagccctgggatcctgctcaacatcctacagtgcacaagacaccccaccacagattagcattcatcttgccttaaatgttaatactgctgaggtcaagtaaccctgtcttagcatgtaagattttgtctgtccatttagctatctatttatccattcattcattcctgtatacctaacctatcatccatccttatctcttgtgtatctattcattcaatcatacacccatatctgtctgtctgtctatctatctatctatctatctatctatctatctatctatctatctgcctatctgcctgcctacctatccctctatggcaattgcttgcaaccagggagattttattcccaggagatatttggctatgtctgacaacaatttttttggttgtcacaaatgggatgaatgttactggcatctggtgggtggagcccagagatgctgctcaacaccctacagtgcacaagacagacccaccacaaagaatcctccatacagccttaaatgtccctagtactgaagccaagaaaccctatcttagtatgaaaatgttggtctatctgtctatatacctgcttatctatccatccatttctatctacctaacctatccatccatccattctaatgtcttatgtatccatctattcatccatccacccatctctccatccatttatccatccatccatcgatatgtatgtatgtatgtatgtatgtatctttctatctatctatctatctagtctgtctactgatctagctagctagctagctatggtagttgtttgcaaccaaggagattttactcccaggagacatttggctgtgtctggaaacattttttggttgtcacagatgggatggatactgctggcatctggtggatggagtccagggacattgctcaacaccctacagttcataggttggccccatcacagagaatcatctaggctcaaatgtcactagtgccaaggttgagaaaccctgagctagattcaaaaaagggctaatatctctttaataagtgtgtcaaaaaatagaggacactgacagtagagtaaaggtaaaatggagtccaactcagttcacgctgctatggtggagaatccctggattgtgctgtcttcggcattcagcagctcaagcaggaaagcctctcaccatggtgagagcaaaatcagtgtccaagggtttcttctgcacatttgtatctgcccttctaggactctttgcagttcaggaaaagggctgagatgcctttcccctgcctgtattttatactttagatggctgggtggtgctctgaagagcttgcacaatcagtccagaagaatcatgtaccaaatatacccaggaatgccttccagcttagcagatgtgctgccactaagaaaactgttttccattgaatttggcatggtggaggcaattttgaatggataacagtacaagaatgcagttccactaggatttttgagtcattctattaatatctccatataaatcctaaataaattataaactgttatttatgttactttattctttgtaaattctgactatattcttagtaaagtgtaattgaacaaatcatgtgcattttgtcagagcaggctcttccctgcctacatgttgggattatttaaaaataaaaatatagggccttgtgtgatgcctgacacctgtaatcccagcactttgggaggccaatgtgggtggattgcttgaggtcaggagttcaagaccagcctgaccaacatggtgaaaccctgtctctactcaaaatacaaaaattagcagggcatagtgcacatgcctgtagtcccagctacttggaagcctgaggcaggagaattgcttgaacccagaaggtagaggtttcagtgagccaagatcaggccactgcactgcagcctgggtgacaaagtgagactccatctcaaaaaacaaaaagaaaaacaagtatcagagctttgtttcttgaagtcaaatccctcacaatgcatagacatctgtggctttcagatttgctcagttgatttattctgatgaaaactggattaggggtcactgttacggaagccatagaacgtttacatacacatgctaccataatcatttttggattcaaactccaagacacattaaaatgtgcttgcctgccccacagctattaaattccttactgagttacattgacttcattctcactcataacccacaaaacagtatattttgtcattgttaattgttgcttttattacaatgattaggttgaatgtaagcacaagcaggctcatttttgttaagatctatgacattgtcttagacatgtcattagaaaaatggaatgttgccacatgtggtggcacatgcctgtattcccagcactttgggagatgagcagaaggatcacttaagtccaggagttcaaaaccagcccagacaacatagcaaaatcctgtctctacaaaaaaacaaaaacaaaaaagcaaaaaacaaacaaacaaacaaacaaacaaacaaaaaaacacctccagccaggcataggcatattggtatatggttatagtccaaactactcaggaggctgagataatagggtcccttgagtccaggagatcaagactacagttagctatgattgcaccactgcactccaccctggatgacaaagcaagatcccaattcttcagaaaaaaaagaaagtgtggcatttaggaaatattaaggctcccattacaatgtatgtgtcatggaggattcaacagggacaattttaaaagtgagaactttctcaatcttttcactggattatccaacatgctagttctgaataactaaaggatacttcagtatttatgaaactgttacatatataatgaagattttcctatcatcctttctaggttgcctctattaaactgtttgtaattattaactcagcagtgcttagacttcatggggaagaatggtacaccagccttggggtcttagctagtgagtgttattcagctttaattacaaattctagaaaacccgttacaccaatattgccaacttctgaagagcccaattttagccttggaactctgggcataaccataattacatgaccttagagttgctttttctgactcttgcccaaaactgggatacaacagcttaaaaaaaaaattgccaaaagtagaaacagtgtctaaagcattttctccaggaagaaattaacatctttattaggctgactcagattcatcaccatctccatgactgcagcattttatctgattttgtttttacattgacctctgcaatgactaccatgcaaatacttgatccagacacacttgcaggaataggactgacatctttgactacatttcatgtccttgaacccatggtcaggccaacctaacatcagatttaacagggagttgttatttgcagtcaatcactttccacaatcttctccaggctgtaaaaaccattgggcattttgcaatagcagccacgtgggctgatgcatcacagaaatacctattttttgtgttattccagtgacataacgccatggtagagtatttgggaaactgacatcttaattgtttttctttttttctgtagttttgatagtagaatcaaggtgtttgccaacaggaccctggtggtgaaatcaatgacagacaaagacgccggagattacctgtgtgtagctcgaaataaggttggtgatgactgcgtggtgctcaaggtggatgtgatgatgaaaccggccaagattgaacacaaggaggagaacgaccacaaagtcttctacaggggtgacctgaaagtggactgtgtggccactggacttcccaatcccgagatctcctggagcctcctggatgggagtctggtgaactccttcatgcagtcagatgacagtggtggacgcaccaagcactatgtggtcttcaacaatgggacactctacttcagtgaagtggggatgagggaggaaggagactacacctgctttgctgaaaatcaggttgggaaggatgagatgagagtcagagtcaagatggtgacacctgccaccatctggaacaagacttacttggcagttcaggtaccctatggagatgtggtcactgtaacctgtgaggccaaaggagaacccatgcccaaggtgacttggttgtccccagccaacagggtgatccccacctcctctgagaagtatcagatataccaatatggcactctccttattcagaaagcccagtgctctgacagcggcaactacacctgcctggtcaggaacagtgccggagaggataggaagacagtgtggattcacgtcaacctccagccacccaagatcaatggtaaccccaaccccatcaccaccgtgtgggagatagcagccgggggcagtcggaaactgattgactgcaaagctgaaggcatccccaccccgagggtgttatgggcttttcccgagggtgtggttctgccagatccatactatggaaaccggatcactgtccatggcaacggttccctggacatcaggagtttgaggaagagcgactccgtccagctggtatgcatggcacgcaacgagggaggggaggcgaggttgatcgtgcagctcactgtcctggagcccatggagaaacccatcttccacgacccgatcagcgagaagatcacggccatggcgggccacaccatcagcctcaactgctctgccgcggggaccctgacacccagcctggtgtgggtccttcccaatggcaccgatctgcagagtggacagcagctgcagcgcttctaccacaaggctgacggcatgctacacattagcggtctctcctcggtggacgccggggcctaccgctgcgtggcccgcaatgccgcggcgacacggagaggctggtctccctgaaggtgggactgaagccaagaagcaaacaggcagtatcataacctggtcagcatcatcaatggtgagaccctgaagctcccctgcacccctcctgcagctgggcagggacatttctcctggacactccccaatggcatgcatctggagggcccccaaaccctgggacgcgtttctcttctggacaatggcaccctcacggttcgtgaggcctcggtgtttgacaggggtacctatgtatgcaggatggagacggcgtacggcccttcggtcaccagcatccccgtgattgtgatcgcctatcctccccggatcaccagcgagcctaccccagtcatctacacccgtcccgggaacaccgtgaaactgaactgcatggctatggggattcccaaaggtgacatcacgtgggagttaccggataagttgcatctgaaggcaggggttcaggctcgtctgtatggaaacagatttcttcacccccagggatcactgaccatccagcaggccagacggagagacgctggcttctacaagtgcacggcaaaaaacattctcagcagtgactccaaaacaacttatatccatgtcttctgaaatgtggattccagaatgattgctcaggaactgacaacaaagcggggtttgtaagggaagccaggctggggaatcagagctcttaaataatgtgtcacagtgcatggtggcccccggtgggattcaagttgaggttgatcttgatctacaattgttgggaaaaggaagcaatacagacatgagtaaaagggctcagcctcactgagaactttcttttgtgtttacatcatgccaggggcttcattcagggtgtctgtgctctgactgtaatttttatttttttgcaaatgtcattcgactgcctgcgtaagtgtccataggatatctgaggaacattcaccgaaaataagccatagacatgaacaacacctcactcccccattgaagatgcatcgtctagttaacctgctgcagtttttacatgatagactttgttccagattgacaagtcatctttcagttatttcctctatcacttcaaaactccagcttgcccaataaggatttagaactagagtgattgttatatatataaattatatatatataaattacatttatatatatataatttatatataatatatatattttaattcagagttacatacatacagctaccattttatatgaaaaaaacatttcttcctggaacccactttttatgtaatttttttatataaatatttttcctttcaaatcagatgatgagactagaaggagaaatactttctgtctcattaaaattaataaatgattggtctttacaagacttggatacattacagcagacatggaaatagaattttaaacaattcctctccaacctccttcaaattcagtcgctactgttatgttactttctccagcaaccctgcactggggaaggctgtgatattagatttccttgtatgcaaagtttttgttgaaagctgtgctcagcggaggtgagaggagaggaggagaaaactgcatcatatctttccagaattgaatctagagtcttccctggaaagcccagaaacttctctgcagtatctgacttgtccatctggtctaaggtggctgcttcttccgcaaccatgagttagtctgtgtccatgaataatacaagatctgttatttccatgactgctttactgtaattttagggtcaatatactgtacatttgataataaaatatattctcccaaaaa

SEQ ID NO: 887 - DNA, 8895 bp, Homo sapiens
acgtgcagcgcgctgcgcgccaacgcgcgcatcacgggcacctcctcgcagaggacggacgtcaggtacggagggaccctcaagctggactgcagcgcctcgggggatccctggccgcgcatcctctggaggctgccgtccaagaggacgatcgacgcgcttttcaggtaggcagctccgcgtggcttcctgtaaatcgctgggctggtggccccaacgaatataagtccttgttcaggatgaatatgcacacacattggtccctgcgtgcgataaaattaaatgaaattaattagcaggacacggtggctcacgcctataatcccagcactttggggccaaggcgggcggatcagttgaggtccggagttcgagaccagcttggctaacatggtgaaaccctgtctcaacaaacatacaaaaatttgccggacgtggtggcgagcgtctgcagtcccagctcctcgggaggctgaggtaagataattgcttgaacccagaaggtggcggttgcagtgagccaagatcacgccactgcacgccagcctggacgacagactgacactctatctaaaaataataataagttaattaattaagttgagacagggtgttgctctgtcacccagactgcagtgcagtggtgcgatcatacctcactgcagcctcaaactcctgggctgaagcgatcccctgagtagctgggattacaggtgtgcaccatgaggcacgactcttcttcttcttcttcctcttctccttcttcttcttcctcttcttcttcttttcttctttcttcttcttcttcctcttcttcttcctctccttcttctccttcttcttcttcctttcttcttcctcttcttcttcttttctttctttctttttctttcttcttctttcttcttcttcctcttctttcttcttcttttcttctttcttcttcttctccttcttcttcttcttcttcttcttcttcttcttcttcttcttcttcttcttcttctttcttctctcttcctcttcctattcttcttcttctttcttcctcttcctcctcttcctcttcctcttcttcttctttcttcaatttatgtagagatgggatctgctatgttgccaagtatgatcttgaacacttaacctcaagcagtcctcctgccctgacctaccaaagtgctgagatgacaggcttgagccaccgcgcctgaccctgtgtgtgatttttatgcaatgacattttgtatctctaaacttggatctacaacgaatgcttaacttcctcttaacaaatacttaacttcctcctctcttgtcccattcaaaaaaaaaaaaaaaggaaaaaaataaatcaagaaactgttgttttaatgattatatgtttaactataatgttagggcaaacaattcagcttgcttctatttccattgtagatttcaacaatatacatagatgtgttaggctttattttaatatggcattattggtacaatcaaagtgtacacattgttttaaaagcatcattaccacaccaacatagtgcacttgaaatgatacaaatgtacttgggctatgaagaaagccaccttctaatcaagtaccatcagttcccagatatacaggtttatggcagtgcttttcaaccaagggtgattttgccccaggacaacccttggcaacatccgaagacacctttgattatcacaaatggggcggtgggtgcttctggtatctggtgggtggagcccagggacagtgctcaacaccttgcagtgcacaggatggcccatcacagatagtcatccatcctaccttcaatgtccatagtgccgaggtcaagttactctgtcttagcaggaaagattctatctatctatctgtctatctatctatctatctatctatctatctatctatctatctaatctataatctatccatccttctacctatttcatctatcttctatctatctatctatctatctatctatctatctatcatctctctgtctatccatccattatctatggcagtcgtttgcaaccaggcatcaggtgttccttagtccctaggggacacttggtgatgtatggagacatttttggtcatcatgactctggggtggagggtgtgcttctggtatctggttgctgcagccctgggatcctgctcaacatcctacagtgcacaagacaccccaccacagattagcattcatcttgccttaaatgttaatactgctgaggtcaagtaaccctgtcttagcatgtaagattttgtctgtccatttagctatctatttatccattcattcattcctgtatacctaacctatcatccatccttatctcttgtgtatctattcattcaatcatacacccatatctgtctgtctgtctatctatctatctatctatctatctatctatctatctatctatctgcctatctgcctgcctacctatccctctatggcaattgcttgcaaccagggagattttattcccaggagatatttggctatgtctgacaacaatttttttggttgtcacaaatgggatgaatgttactggcatctggtgggtggagcccagagatgctgctcaacaccctacagtgcacaagacagacccaccacaaagaatcctccatacagccttaaatgtccctagtactgaagccaagaaaccctatcttagtatgaaaatgttggtctatctgtctatatacctgcttatctatccatccatttctatctacctaacctatccatccatccattctaatgtcttatgtatccatctattcatccatccacccatctctccatccatttatccatccatccatcgatatgtatgtatgtatgtatgtatgtatctttctatctatctatctatctagtctgtctactgatctagctagctagctagctatggtagttgtttgcaaccaaggagattttactcccaggagacatttggctgtgtctggaaacattttttggttgtcacagatgggatggatactgctggcatctggtggatggagtccagggacattgctcaacaccctacagttcataggttggccccatcacagagaatcatctaggctcaaatgtcactagtgccaaggttgagaaaccctgagctagattcaaaaaagggctaatatctctttaataagtgtgtcaaaaaatagaggacactgacagtagagtaaaggtaaaatggagtccaactcagttcacgctgctatggtggagaatccctggattgtgctgtcttcggcattcagcagctcaagcaggaaagcctctcaccatggtgagagcaaaatcagtgtccaagggtttcttctgcacatttgtatctgcccttctaggactctttgcagttcaggaaaagggctgagatgcctttcccctgcctgtattttatactttagatggctgggtggtgctctgaagagcttgcacaatcagtccagaagaatcatgtaccaaatatacccaggaatgccttccagcttagcagatgtgctgccactaagaaaactgttttccattgaatttggcatggtggaggcaattttgaatggataacagtacaagaatgcagttccactaggatttttgagtcattctattaatatctccatataaatcctaaataaattataaactgttatttatgttactttattctttgtaaattctgactatattcttagtaaagtgtaattgaacaaatcatgtgcattttgtcagagcaggctcttccctgcctacatgttgggattatttaaaaataaaaatatagggccttgtgtgatgcctgacacctgtaatcccagcactttgggaggccaatgtgggtggattgcttgaggtcaggagttcaagaccagcctgaccaacatggtgaaaccctgtctctactcaaaatacaaaaattagcagggcatagtgcacatgcctgtagtcccagctacttggaagcctgaggcaggagaattgcttgaacccagaaggtagaggtttcagtgagccaagatcaggccactgcactgcagcctgggtgacaaagtgagactccatctcaaaaaacaaaaagaaaaacaagtatcagagctttgtttcttgaagtcaaatccctcacaatgcatagacatctgtggctttcagatttgctcagttgatttattctgatgaaaactggattaggggtcactgttacggaagccatagaacgtttacatacacatgctaccataatcatttttggattcaaactccaagacacattaaaatgtgcttgcctgccccacagctattaaattccttactgagttacattgacttcattctcactcataacccacaaaacagtatattttgtcattgttaattgttgcttttattacaatgattaggttgaatgtaagcacaagcaggctcatttttgttaagatctatgacattgtcttagacatgtcattagaaaaatggaatgttgccacatgtggtggcacatgcctgtattcccagcactttgggagatgagcagaaggatcacttaagtccaggagttcaaaaccagcccagacaacatagcaaaatcctgtctctacaaaaaaacaaaaacaaaaaagcaaaaaacaaacaaacaaacaaacaaacaaacaaaaaaacacctccagccaggcataggcatattggtatatggttatagtccaaactactcaggaggctgagataatagggtcccttgagtccaggagatcaagactacagttagctatgattgcaccactgcactccaccctggatgacaaagcaagatcccaattcttcagaaaaaaaagaaagtgtggcatttaggaaatattaaggctcccattacaatgtatgtgtcatggaggattcaacagggacaattttaaaagtgagaactttctcaatcttttcactggattatccaacatgctagttctgaataactaaaggatacttcagtatttatgaaactgttacatatataatgaagattttcctatcatcctttctaggttgcctctattaaactgtttgtaattattaactcagcagtgcttagacttcatggggaagaatggtacaccagccttggggtcttagctagtgagtgttattcagctttaattacaaattctagaaaacccgttacaccaatattgccaacttctgaagagcccaattttagccttggaactctgggcataaccataattacatgaccttagagttgctttttctgactcttgcccaaaactgggatacaacagcttaaaaaaaaaattgccaaaagtagaaacagtgtctaaagcattttctccaggaagaaattaacatctttattaggctgactcagattcatcaccatctccatgactgcagcattttatctgattttgtttttacattgacctctgcaatgactaccatgcaaatacttgatccagacacacttgcaggaataggactgacatctttgactacatttcatgtccttgaacccatggtcaggccaacctaacatcagatttaacagggagttgttatttgcagtcaatcactttccacaatcttctccaggctgtaaaaaccattgggcattttgcaatagcagccacgtgggctgatgcatcacagaaatacctattttttgtgttattccagtgacataacgccatggtagagtatttgggaaactgacatcttaattgtttttctttttttctgtagttttgatagtagaatcaaggtgtttgccaacaggaccctggtggtgaaatcaatgacagacaaagacgccggagattacctgtgtgtagctcgaaataaggttggtgatgactgcgtggtgctcaaggtggatgtgatgatgaaaccggccaagattgaacacaaggaggagaacgaccacaaagtcttctacaggggtgacctgaaagtggactgtgtggccactggacttcccaatcccgagatctcctggagcctcctggatgggagtctggtgaactccttcatgcagtcagatgacagtggtggacgcaccaagcactatgtggtcttcaacaatgggacactctacttcagtgaagtggggatgagggaggaaggagactacacctgctttgctgaaaatcaggttgggaaggatgagatgagagtcagagtcaagatggtgacacctgccaccatctggaacaagacttacttggcagttcaggtaccctatggagatgtggtcactgtaacctgtgaggccaaaggagaacccatgcccaaggtgacttggttgtccccagccaacagggtgatccccacctcctctgagaagtatcagatataccaatatggcactctccttattcagaaagcccagtgctctgacagcggcaactacacctgcctggtcaggaacagtgccggagaggataggaagacagtgtggattcacgtcaacctccagccacccaagatcaatggtaaccccaaccccatcaccaccgtgtgggagatagcagccgggggcagtcggaaactgattgactgcaaagctgaaggcatccccaccccgagggtgttatgggcttttcccgagggtgtggttctgccagatccatactatggaaaccggatcactgtccatggcaacggttccctggacatcaggagtttgaggaagagcgactccgtccagctggtatgcatggcacgcaacgagggaggggaggcgaggttgatcgtgcagctcactgtcctggagcccatggagaaacccatcttccacgacccgatcagcgagaagatcacggccatggcgggccacaccatcagcctcaactgctctgccgcggggaccctgacacccagcctggtgtgggtccttcccaatggcaccgatctgcagagtggacagcagctgcagcgcttctaccacaaggctgacggcatgctacacattagcggtctctcctcggtggacgccggggcctaccgctgcgtggcccgcaatgccgcgggccacacggagaggctggtctccctgaaggtgggactgaagccagaagcaaacaagcagtatcataacctggtcagcatcatcaatggtgagaccctgaagctcccctgcacccctcctgcagctgggcagggacatttctcctggacactccccaatggcatgcatctggagggcccccaaaccctgggacgcgtttctcttctggacaatggcaccctcacggttcgtgaggcctcggtgtttgacaggggtacctatgtatgcaggatggagacggcgtacggcccttcggtcaccagcatccccgtgattgtgatcgcctatcctccccggatcaccagcgagcctaccccagtcatctacacccgtcccgggaacaccgtgaaactgaactgcatggctatggggattcccaaaggtgacatcacgtgggagttaccggataagttgcatctgaaggcaggggttcaggctcgtctgtatggaaacagatttcttcacccccagggatcactgaccatccagcaggccagacggagagacgctggcttctacaagtgcacggcaaaaaacattctcagcagtgactccaaaacaacttatatccatgtcttctgaaatgtggattccagaatgattgctcaggaactgacaacaaagcggggtttgtaagggaagccaggctggggaatcagagctcttaaataatgtgtcacagtgcatggtggcccccggtgggattcaagttgaggttgatcttgatctacaattgttgggaaaaggaagcaatacagacatgagtaaaagggctcagcctcactgagaactttcttttgtgtttacatcatgccaggggcttcattcagggtgtctgtgctctgactgtaatttttatttttttgcaaatgtcattcgactgcctgcgtaagtgtccataggatatctgaggaacattcaccgaaaataagccatagacatgaacaacacctcactcccccattgaagatgcatcgtctagttaacctgctgcagtttttacatgatagactttgttccagattgacaagtcatctttcagttatttcctctatcacttcaaaactccagcttgcccaataaggatttagaactagagtgattgttatatatataaattatatatatataaattaaatttatatatatataatttatatataatatatatattttaattcagagttacatacatacagctaccattttatatgaaaaaaacatttcttcctggaacccactttttatgtaatttttttatataaatatttttcctttcaaatcagatgatgagactagaaggagaaatactttctgtctcattaaaattaataaatgattggtctttacaagacttggatacattacagcagacatggaaatagaattttaaacaattcctctccaacctccttcaaattcagtcgctactgttatgttactttctccagcaaccctgcactggggaaggctgtgatattagatttccttgtatgcaaagtttttgttgaaagctgtgctcagcggaggtgagaggagaggaggagaaaactgcatcatatctttccagaattgaatctagagtcttccctggaaagcccagaaacttctctgcagtatctgacttgtccatctggtctaaggtggctgcttcttccgcaaccatgagttagtctgtgtccatgaataatacaagatctgttatttccatgactgctttactgtaattttagggtcaatatactgtacatttgataataaaatatattctcccaaaaa

SEQ ID NO: 888 - DNA, 9765 bp, Homo sapiens
ccgaataccaggatacaacggtttgaggttctcaagaacggtaccttagtgatacggaaggttcaagtacaagatcgaggccagtatatgtgcaccgccagcaacctgcacggcctggacaggatggtggtcttgctttcggtcaccgtgcagcaacctcaaatcctagcctcccactaccaggacgtcactgtctacctgggagacaccattgcaatggagtgtctggccaaagggaccccagccccccaaatttcctggatcttccctgacaggagggtgtggcaaactgtgtcccccgtggagggccgcatcaccctgcacgaaaaccggaccctttccatcaaggaggcgtccttctcagacagaggcgtctataagtgcgtggccagcaatgcagccggggcggacagcctggccatccgcctgcacgtggcggcactgccccccgttatccaccaggagaagctggagaacatctcgctgcccccggggctcagcattcacattcactgcactgccaaggctgcgcccctgcccagcgtgcgctgggtgctcggggacggtacccagatccgcccctcgcagttcctccacgggaacttgtttgttttccccaacgggacgctctacatccgcaacctcgcgcccaaggacagcgggcgctatgagtgcgtggccgccaacctggtaggctccgcgcgcaggacggtgcagctgaacgtgcagcgtgcagcagccaacgcgcgcatcacgggcacctccccgcggaggacggacgtcaggtacggaggaaccctcaagctggactgcagcgcctcgggggacccctggccgcgcatcctctggaggctgccgtccaagaggatgatcgacgcgctcttcaggtaggcagctctgcgtggcttcctgtaaatcgctgggctggtggccccaacgaatatgagtcctttttcaggatgaatatgcacacacgttgctccctgcgtccgataaaattaaatgaaattaattagcagggcacggtggctcacgcctgtaatcccagcactttgggaggacgaggcgggcggatcacttgaggtcaggagttcgagaccagcctggccgacatggtgaaacactgtctctaataaacatacaaaaatttgcgggcattgtggcgagcgtctgtagtcccagctactctggaggctgaggcaggagaattgcttgaacccgggaggtggaggttgcagtgagccaagatcatgccacttcactccaccctggacgacagagtgacattccatctcaaataataataataataaattcattagagacagggtgtcactctgttgcccaggctggagtgcagtggtgcgatcatagctcactgcagcctcaaacttctgggttcaagcgatcgtccagcctcagcctcctgaagtagctgggactacaggtgtgcaccatgaggcacggcttgttattattattattattattaactttttgtagagatgggttctgctgtgttcccaaggatgatctcgaacacttcacctcaagcaatcttcccgccctgacctcccaaagtgctgggatgacaggcttgagctcctgtgcctggcccggtgtgtgatttatttatttatttatttatttatttatttatttatttatttatttttgagacggaatctcgctctgtggcccaggctggagtgcagtggcactatcttggctcactgcaagctccgcctcccgggttcacgccattctcctgcctcagcctcccgtgtagctgggactacaggcgcccgccaccacgcctggctaattttttgtatttttagtagagacggggtttcaccgtgttagccaggatggtctcgatctcctgacctcctgatccgccgcgcccggccccagtgtgtgctttttctgcaatgaaattttgtccctctaaactcggatccagaacaaatactcaacttcttaacaaatacttaacttcctcctctcttgccccataaaaaaaaaaaggaaaaaaggataaatgaaccaagaaattcttgttttaatgattatatgtttaactataatgttaggacaaacaattcagcttgcctctatttccattattgatttcaacaaaatacatagacgtgttaggctttattttaatatgacattattgatagagtcaaagtgtatacattgttttaaaagcatcattaccacaccaacatagtgcacttgaaatgataaaaatgtacttgggctatgaagaaagccaagccaccttctaatcaagtgccatctgttcccagatatacaggtttatggcagtgcttttcaaccaagggtgattttgccccaagacaacacttggcaatatctgaagacacctttgattatcacaaatggggcagtgggtgcttctggtatctggtgggtggaggccagggacggtgctcaacaccctgcagtgcacaggatggcccatcacagattgtcatccatcctaccttcaatgtccatagtgccaaggtcaggtaactctgtcttagcatgaaaggttctatctatctatctatctatctatctatcatctatctatctatctattctatctatctatctatctatctatcatctatctatctatatctatctatctatcatctgtctgtctttctgtctatccatccatcatctatggcagtggtttgcaaccaggcatcaggtgttccttagtccccaagggacagttggtgatgtatggagacattttaggtcatgatgactctggggtggagggtgtgcttctggtatatggtggctgcagccccgggatgctgctcaacaccctacagtgcacaggacaccccaccccagattagcattcatcttgccttaaatgttactacggctgaggtcaagtaaccctgtcttagcatgtaagattttgcctatccatttacctatctatttatccattcattcattcctgtatacttaacctatccatccatctttatctcttatgtatctattcattcatgcatccacccatatctatctatctatctatctatctatctatctatctatctatctgcctacctacctgtctatggcagttgtttacaaccaaggagattttattccaaggagatatttggctatgtctggcaacatttttttggttgtcacaaatgggatgaatgttactggcatctggtgggtggagcccggagatgctgctcaacaccctacagtgcacaggacagacccaccacagagaatcctccatccagccttaaatgtccctagtactgaagccaagaaaccctatcttagtatgaaaatgttggtctatctatatacctgcttatccatccatccatgtctatctacctaacctatccatccattcattcttatctcttacgtatccatctattcatccatccatccatctatccatccatttatccatccgtatctatctgtctatctgtctactcatctatctagctagctagctatggcagttgtttgcaaccaaggagattttactcccaggagacatttggctgtgtctggcaacattttgtggttatcacagatgggatggatgctactggcacctggtgggtggagtccggggacactgctcaacaccctacagttcacaggatggccccatcacagagaatcttctagccccaaatgtccctagtgccaagattgagaaaccctgagctagatacaaaaaaagagctaatatctctttaataagcgtttcaaaaaatagaggacccagatagtagaggaaaggtaaaatggagtccaactaaattcacagtgcaatggtggagaacccctggattgtgctgtcttcagcactcagtagctcgagcaggaaagcctcttaccgtgggtccctccccagggtaggagcaaaatcagcgtccaaggttttcttctgcacagttgtgtctggcctcccaggactcttttcaattcaggaaaagggctgagatgccttttccctgcctgtattttatactttagatggctgggtggtgccctgaagagcttgcacaatcaatccagaagagccatgtacccaatttacccaggaatgccttccagcttagcagatgtgctgccacatagagaactgctttccattgaatttggcatggtggaggcaattttgaatggataacagtataagaatgcagttccagtaagatttttgggtcattccattaatgtctccatataaatcctaaataaattataaaccattatttctgtcacttcattcttagtaaattctgactatattcttagtaaagtgtaattgaacaaaccatgtgcattttgtcaaagagcaggctctgccctgctatttaaaaatacaaatattgagccaggcgcagtggctcacacctgtaatcccagcactttgggaggccgaggtgggtggattgcttgaggtcaggagttcaagaccagcctgaccaatatggtgaaaccccgtctctactcaaaatacaaaaattagcagggcgtggtggcctatgcctgtagacccagctactcggaaggctgaggcaggagaatcatttgaacctgggaggcggaggttgcagtgagcggagatcaggccgctgcactccagcctgggtgacagagcgagactccatctcaaaaaacaaaaacaaaaacaaatatcagagcttcgtttcttgaagctgaatctctcacgatgcacaggcatctgtggctttgagatttgctcagttgattctgatgacaactgggctaggggtcactgttaatggaagcctcagaatgtttacagacacatgctaccatactcatttttggattcaaattccaaggcacatttaaatgtccttgcctgtcccacacctgttaaattccttaccaagttacattgacttgattctcactcatggcccacaaaacagtgtatatggtcattgttaatcattgcttttattacaatgattaggttgaatgtaatcacaactgggcttattttaaaagatctatgacagtgtcttagacatgccattagaaaaatggagtcttgccaggtatggtggctcatgcctgtaatcccagcactttgggagaccaaggcagaaggatcacttaagtccaggagttcaaactcagtctggacaacatagcaagatcccttctctacaaaataaaaaataaaaaaaactccatccaggcatattggtgtattgttgtagtccaagctactcaggaggctgagatggaagtgtcccttgagtccaagagatcgagactacagttagctatgattgcaccactgcactccagcctgggtgacaaacaagatctcagttcttaaaaaaaaaaaaaaaaaagaaagtgtggtatttaggaaatattaaggctcccattataatgtatgtgtaattgagaattcaatagggacaactttaaaagtgagaactttctcaatcttttcactggattattcaacatattagttccgaataactaaaggatacttcagtatttataaaactcttacatacataatgaagattttcctatcatcctttctagtttgcctctgttaaacctttttgtaattattaactcggcagtgcttggacttcatggggaagaatgacacaccagccttgaggttttagctagtgagtgttattcagctttaattacaaattctagaaaacctgttacaccaatagggccagcttctgaagatcccaattttagccttaaaactcaccttgaaactctgggcataaccataattacatgaccttattagagttgcttttctgactcttgcccaaaactgggatacaacagctttaaaaaaagaaattgccaagagtagaaaccgtgtctaaagcattttctccaggaagaatttaacatctttataaggttgacccagattcttcaccatctccatgactgtagcattttatctgattttgttgttacaatgacctctgtaatgaccaccatgcaaatacttgatccacacacacttgcaggaatgggattgacgtctttgactacatttcatgtccttgaacccatggtcaggccagcctaacatcagattcaacagggagttcttatttgcagtcaatcactttccacaaccttctccaggctgtaaaaaccactgggcattctgcaatagcagccacctgagctgatgcatcacagaaacacctatttttgtgttattccagcgacctaatgccacactagagcatttgggaaactgacatcttactcctttttctttttttctgtagttttgatagcagaatcaaggtgtttgccaatgggaccctggtggtgaaatcagtgacggacaaagatgccggagattacctgtgcgtagctcgaaataaggttggtgatgactacgtggtgctcaaagtggatgtggtgatgaaaccggccaagattgaacacaaggaggagaacgaccacaaagtcttctacgggggtgacctgaaagtggactgtgtggccaccgggcttcccaatcccgagatctcctggagcctcccagacgggagtctggtgaactccttcatgcagtcggatgacagcggtggacgcaccaagcgctatgtcgtcttcaacaatgggacactctactttaacgaagtggggatgagggaggaaggagactacacctgctttgctgaaaatcaggtcgggaaggacgagatgagagtcagagtcaaggtggtgacagcgcccgccaccatccggaacaagacttacttggcggttcaggtgccctatggagacgtggtcactgtagcctgtgaggccaaaggagaacccatgcccaaggtgacttggttgtccccaaccaacaaggtgatccccacctcctctgagaagtatcagatataccaagatggcactctccttattcagaaagcccagcgttctgacagcggcaactacacctgcttggtcaggaacagcgcgggagaggataggaagacggtgtggattcacgtcaacgtccagccacccaagatcaacggtaaccccaaccccatcaccactgtgcgggagatagcagccgggggcagtcggaaactgattgactgcaaagctgaaggcatccccaccccgagggtgttatgggcttttcccgagggtgtggttctgccagctccatactatggaaaccggatcactgtccatggcaacggttccctggacatcaggagtttgaggaagagcgactccgtccagctggtatgcatggcacgcaacgagggaggggaggccaggttgatcctgcagctcactgtcctggagcccatggagaaacccatcttccacgacccgatcagcgagaagatcacggccatggcgggccacaccatcagcctcaactgctctgccgcggggaccccgacacccagcctggtgtgggtccttcccaatggcaccgatctgcagagtggacagcagctgcagcgcttctaccacaaggctgacggcatgctacacattagcggtctctcctcggtggacgccggggcctaccgctgcgtggcccgcaatgccgctggccacacggagaggctggtctccctgaaggtgggactgaagccagaagcaaacaagcagtatcataacctggtcagcatcatcaatggtgagaccctgaagctcccctgcacccctcccggggctgggcagggacgtttctcctggacgctccccaatggcatgcatctggagggcccccaaaccctgggacgcgtttctcttctggacaatggcaccctcacggttcgtgaggcctcggtgtttgacaggggtacctatgtatgcaggatggagacggagtacggcccttcggtcaccagcatccccgtgattgtgatcgcctatcctccccggatcaccagcgagcccaccccggtcatctacacccggcccgggaacaccgtgaaactgaactgcatggctatggggattcccaaagctgacatcacgtgggagttaccggataagtcgcatctgaaggcaggggttcaggctcgtctgtatggaaacagatttcttcacccccagggatcactgaccatccagcatgccacacagagagatgccggcttctacaagtgcatggcaaaaaacattctcggcagtgactccaaaacaacttacatccacgtcttctgaaatgtggattccagaatgattgcttaggaactgacaacaaagcggggtttgtaagggaagccaggttggggaataggagctcttaaataatgtgtcacagtgcatggtggcctctggtgggtttcaagttgaggttgatcttgatctacaattgttgggaaaaggaagcaatgcagacacgagaaggagggctcagccttgctgagacactttcttttgtgtttacatcatgccaggggcttcattcagggtgtctgtgctctgactgcaatttttctttttttgcaaatgccactcgactgccttcataagcgtccataggatatctgaggaacattcatcaaaaataagccatagacatgaacaacacctcactaccccattgaagacgcatcacctagttaacctgctgcagtttttacatgatagactttgttccagattgacaagtcatctttcagttatttcctctgtcacttcaaaactccagcttgcccaataaggatttagaaccagagtgactgatatatatatatattttaattcagagttacatacatacagctaccattttatatgaaaaaagaaaaacatttcttcctggaactcactttttatataatgttttatatatatattttttcctttcaaatcagacgatgagactagaaggagaaatactttctgtcttattaaaattaataaattattggtctttacaagacttggatacattacagcagacatggaaatataattttaaaaaatttctctccaacctccttcaaattcagtcaccactgttatattaccttctccaggaaccctccagtggggaaggctgcgatattagatttccttgtatgcaaagtttttgttgaaagctgtgctcagaggaggtgagaggagaggaaggagaaaactgcatcataactttacagaattgaatctagagtcttccccgaaaagcccagaaacttctctgcagtatctggcttgtccatctggtctaaggtggctgcttcttccccagccatgagtcagtttgtgcccatgaataatacacgacctgttatttccatgactgctttactgtatttttaaggtcaatatactgtacatttgataataaaataatattctcccaaaaaccgggcagtgatgacaatgctattttcaaggacaaaagagggtctcatgaatctgggtttccatcagagcagttgaaaaaactgctttcattcactttctctcaatgattagcttctctacacatttttaacaggcaaggaaactgagtcaaaggcaatgcttctgatgacagatttggcaggcagggtttgagtgtcacttgcatgtagtgacaatttcagtatgcagcaagacagtgtggggactgagaagcagtgctctaggaaatccttcaggatttttcttttttaatttttgtcaaagtgacatctggaaatacatgtactggtgttccacaaa

SEQ ID NO: 889 - DNA, 1884 bp, Homo sapiens
gcagagtggacagcagctgcagcgcttctaccacaaggctgacggcatgctacacattagcggtctctcctcggtggacgctggggcctaccgctgcgtggcccgcaatgccgctggccacacggagaggctggtctccctgaaggtgggactgaagccagaagcaaacaagcagtatcataacctggtcagcatcatcaatggtgagaccctgaagctcccctgcacccctcccggggctgggcagggacgtttctcctgacgctccccaatggcatgcatctggagggcccccaaaccctgggacgcgtttctcttctggacaatggcaccctcacggttcgtgaggcctcggtgtttgacaggggtacctatgtatgcaggatggagacggagtacggcccttcggtcaccagcatccccgtgattgtgatcgcctatcctccccggatcaccagcgagcccaccccggtcatctacacccggcccgggaacaccgtgaaactgaactgcatggctatggggattcccaaagctgacatcacgtgggagttaccggataagtcgcatctgaaggcaggggttcaggctcgtctgtatggaaacagatttcttcacccccagggatcactgaccatccagcatgccacacagagagatgccggcttctacaagtgcatggcaaaaaacattctcggcagtgactccaaaacaacttacatccacgtcttctgaaatgtggattccagaatgattgcttaggaactgacaacaaagcggggtttgtaagggaagccaggttggggaataggagctcttaaataatgtgtcacagtgcatggtggcctctggtgggtttcaagttgaggttgatcttgatctacaattgttgggaaaaggaagcaatgcagacacgagaaggagcgctcagccttgctgagacactttcttttgtgttacatcatgccaggtgcttcattcaggttgtctgtgctctgactgcaatttttcttttttggcaaatgccactcgactgccttcataagcgtccataggatatctgaggaacattcatgagagataagccatagacatgaacaacacctcactaccccattgaagacgcatcacctagttaacctgctgcagttgtgacatgatagactttgttccagattgacaagtcatctgtcagttatttcctctgtcacttcaaaactccagcttgcccaataaggatttagaaccagagtgactgatatatatatatattttaattcagagtgacatacatacagctaccattttatatgaaaaaagaaaaacatttcttcctggactcactttttatataatgttttatatatatattttttcctttcaaatcagacgatgagactagaaggagaaatactttctgtcttattaaaattaataaattattggtctttacaagacttggatacattacagcagacatggaaatataattttaaaaaatttctctccaacctccttcaaattcagtcaccactgttatattaccttctccaggaaccctccagtggggaaggctgcgatattagatttccttgtatgcaaagtttttgttgaaagctgtgctcagaggaggtgagaggagaggaaggagaaaactgcatcataactttacagaattgaatctagagtcttccccgaaaagcccagaaacttctctgcagtatctggcttgtccatctggtctaaggtggctgcttcttccccagccatgagtcagtttgtgcccatgaataatacacgacctgttatttccatgactgctttactgtatttttaaggtcaatatactgtacatttgataataaaataatattctcccaaaaa

SEQ ID NO: 890 - DNA, 25395 bp, Homo sapiens
tattttcttttttttttttttaattatactttaagttctagggtacatgtgcacaatgtgcaggttagttacatatgtatacatgtgccatgctggtgcgctgcacccactaactcgtcatctagcattaggtatatctcccaatgctatccctcccccctacccccaccccaaaacagtccccagagtgtgatattccccttcctgtgtccatgtgatctcattgttcaattcccacctatgagtgaaaatatacggtgtttggtttctctttcttgcgatagtttactgagaatgatgatttccaatttcatccatatccctacaaaggacatgaactcatcattttttatggctgcatagtattccatggtgtatatgtgccacattttcttaatccagtctatcattgttggacattttggttggttccaagtctttgctattgtgaataatgccacaataaacatacgtgtgcatgtgtctttatagcagcatgatttatagtcctttgggtatatacccagtaaggggatggctgggtcaaatggtatttccagttctagatccctgaggaatcgccacactgacttccacagtggttgaactagttgacagtcccaccaacagtgtaaaagtgttcctatttctccacatcctctccagcacctgttgtttcctgactttttaatgattgccattgtaactggtgtgagatggtatctcattgtggttttgatttgcatttctctgatggccagtgatgatggacattttttcatgtgttttttggctgcataaatgtcttcttttgagaagtgtctgttgatgtccttcacccactttttgatggggttgtttgtttttttcttgtaaatttgtttgagttcattgtagattctggatattagccctttgtcagatgagtaggttgtgaaagttttctcccatgttgtaggttgcctgttcactctgacggtagattcttttgctgtgcagaagctctttagtttaattagatccaatttgtcaattttgtcctttgttgccattgcttttggtgttttagacatgaagtccttgcccatgcctatgtcctgaatggtaacgcctaggttttcttctagggttttgatggttttaggtctaatgtttaagtctttaatccatcttgaattgatttttgtataaggtgtaaggaagagatccagtttcagctttctacatatggctagccagttttcccagcaccatttattaaatagggaatcctttccccactgcttgtttttctcaggtttgccaaagatcagatagttgtagatatgcgacattatttctgagttctctgttctgttccattgatctatatctctgttttggtaccagtaccatgctgttttggttactgtagccttgtattatagtttgaagtcaggtagtgtgatgcctccagctttgttcttttggcttaggattgatttggcgatgtgggctcttttttggttccatatgaactttaaagcagttttttccaattctgtgaggaaagtaattggtagcttgatggggatggcattgaatctgtaaattacctttggcagtatggccattttcacgatattgattcttcctacccattagcatggagtgttcttccatttgtttgtatcctcttttatttccttgagcagtggtttgtagttctccttgaagaggtccttcacataccttgtaagttggattcctaggtattttattctctttgaagcaattgtgaatgggagttcactcatgatttggctctctgtttgtctgttgttggtgtataagaatgcttgtgatttttgtacattgattttgtatcctgagactttgctgaagttgcttatcagcttaaggagattttgggctgagacaatggggttttctagatatacagtcatgtcgtctgcaaacagggacaatttgacttcctcttttcctaattgaataccctttatttccttttcctgcctaattgccctggccagaacttccaacactaggttgaataagagtggtgagagagagggcatccctgtcttgtgccagttttcaaagggaatgcttccagtttttgcccattcagtatgatattggctgtgggtttgtcatagatagctcttattattttgaaatacgtcccgtcaatacctattttattgagagtttttagcatgaagagttgttgaattttgtcaaaggccttttctgcatctattgagataaacatgtggtttctgtctttggttctgtttatatgctggattacatttattgatttgtgtaaattgaaccaggcttgcatcccagggatgaagcccacttgatcatggtgaataagcttattgatgtgctgctgggtttgttttgccagtattttattgaggatttttccatcaatgctcatcaaggatattggtctaaaattctctttttttgttgtgctctgcctggctttggtatcaggatgatgctgtcctcataaaaagagttagggaggattccctctttttctattgattggaatagtttcagagggaatggtaccagttcctccttgtacttctggtggaattcggctgtgaatccatctggtcctggactctttttggttggtaaactattgattattgccacaatttcagatcctgttattggtctattcataggttcaactttttcctggtttagtcttgggagagtgtatgtgtccaggaatttatccgtttcttctagattttctagtttatttgcatagtggtgtttgtagtattctctgatggtagtttgtatttctgtgggatcggtggtgttatcccctttatcattttttattgcatctatttgattcttctctcttttttctttattagtcttgctagcagtctataagttttgttgatcctttcaaaaaaccagctcctggattcattaattttttgaagggttttttgtgtctctatttccttcagttctgctctgattttagttatttcttgccttctgctagcttttgaatgtgctcttgcttttctagttcttttaattgtgatgttagggtgtcaaatttggatctttcctgctttctcttatgggtatttagtgctataaatttccctctacacactgctttgaatgtgtcccagagattctggtatgttgggtctttgttctcgttggtttcaaagaacatctttatttctgccttcatttcgttatgtacccagtagtcattcaggagcaggttgttcagtttccatgtagttaagcagttttgagtgagattcttaatcctgagttctagtttgtatgcactgtggtctgagagatagtttgttataatttctgttcttttacatttgctgaggagagctttacttccaagtatgtggtcaattttggaataggtgctgtggtgctgaaaaaaatgtatattctgttgatttggggtggagagttctgtagatgtctattaggtccgcttggtgcagagccgagttcaattcctgagtatccttgttgacttgctgtctcgttgatctgtctaatgttgacagtggggtgttaaagtctcccattattaatgtgtgggagtctaagtctctttgtaggtcactcaggacttgctttatgaatcttggtgctcctgtattgggtgcatatatatttaggatagttagctcttcttgttgaattgatcactttaccaatatgtaatggccttctttgtctctttttatctttgttggtttaaagtctgtattatgagagactaggattgcaacccctgcctttttttgttttccatttgcttggttgatcttcctccatccttttattttgagcctgtatgtgtctcgcacgtgagatgggtttcctgaatacagcacactgatgggtcttgattctgtatccaatttgccagtctgtgtcttttaattggagaatttagtccatttacctttaaagttaatattgttatgtgtgaatttgatcctgtcattatgatgctagctggttattttgattgttagttgatgcagtttcttcctagtcttgatggtctttacaatttggcatgattttgcagtggctgttactggttgttcctttccatgtttagcgcttccttcaggagctcttttagggcaggcctgatggtgacaaaatctctcagcatttgcttttctgtaaagtattttatttctcctttgcttatgaagcttagtttggctggatatgaaattctgggttgaaaattcttttctttaagaatgttgaatattggcccccactctcttctggcttgtagggtttctgccgagagatccgcttgaatctgaacattggccttccttgctagattggggaagttctcctggataatatcctgcagagtgttttccaacatggttccattctccccatcactttcaggtacaccaatcaggcgtagatttggtcttttcacatagtcccatatttcttggaggctttgctcatttctttttattcttttttctctaaacttcccttctcacttcatttcattcatttcaccttccagtactgatgccctttcttgctgttgatcacatcggctcctgaggcttctgcattctttacgtagttcttgagccttggttttcagctccatcagctcctttaagcacttctctgtattggttattctagttatacattcttctaaagttttttcaaagttttcaacttctttgcctttggtttgaatgtcctcccatagctcagaataatttgattgtctgaagccttcttctctcagctcgtcaaagtcattctccgtccagttttcttctgttgctggtgaggaactgcattcctttggaggaggagaggctctctgctttttagagtttccagtttttctgttctgttttttcgccatctttgtggttttatctacttttggtgtttgatgatggtgatgtacagatgagtttttggtgtggatgttctttctgtttgttagttttccttctaacagacaggacactcagccgcaggtctgttggaatacccggctgtgtgaggtgtcagtctgcccctgctgggtacctcccagttaggctgctcgggggtcaggtgtcagggacccacttgaagaggcagtctgccccttctcagatctccagctgcgtgttgggagaaccactgctctcttcaaagctgtcagacagggacatttaagtctgcaaaggttactgctgtctttttgtttgtctgtgccctgcccccagaggtggagcctacagaggcatgcaggcctccttgagctgtggtgggctccacccagttcaagcttcctggctgctttgtttacctaagcaagcctgggcaatggcgggcgcccctcccccagcctcgctgccaccttgcagtttgatctcagactgctgtgctagcaatcagcgagactctgtgggtgtaggaccctccgagccaggtgcgggatataatctcgtggtgcaccgtttttttaagcccattggaaaaacgcagtattcaggtgggagtgacccaattttccacgtgccatctgtcaccccttcctttgactcggaaaggaactccctgaccccttgcgcttcccaagtgaggcaatgccttgccctgctttggctgccacacagtgcacgcatccactgacctgcgcccactgtctggcactccccaatgagatgaacccagtacctcagatggaaatgcagaaatcaccgtcttctgcgtcgctcacactgggagctgtagaccggagctgttgctattcggccatcttcaacaatgctattttcaaggacaaaagagggtcacattaatttgggtttccatcagagtggttgaaaaaactgctttcatcaccttctctcaatgattagcttctctacacatttttaacaggcaaggaaactgagtcaaaggcaatgcttctgatgacagatttggcaggcaggaaggcaggatttgagtgtcagttgcatgtagtgacaatttcagtattcagcaagacagcttggggactgagaagcagtgctctaggaaatcattcaggatttttcttttttatattgttttcaaagagacacctgtatatacatgtatttgtattccacaaatatgcaaaactgtccttcttttgcttcccctgagagtaaggaaaaaggcaaacaagataaatatttgggaaaaatattactgtcagcatttcaagaaatgcagtgtcacaaattgttaaagaatgtcggtcatggaaactaaagaatgctggtttatttttttttaactctgtggaaggcatagagcatgtctctcattcatgaatccacttatttgcttaaatatgtctgcacagcccttacttgtgctggatatcaacagagcctgaggaagcagagaggaggaggaggaggtggtgcttggagtgtttatgctcaatagactggttcttcagatggtgcagggtctctcaaaatgcccatgaatgacatttggggatggatgattctctgggcttgggtgtcctgtgtagggtgttgagaagtatccctgggctctacctgccacatgctagcatccccccacccccaaaaagttgtgatgaccaaaatgtctctggacattaccaaatgcccctttagagggtgcaaacttgctcctgagagccactgatgcggacagattagattggtaaatagataactgatagatgattgatatagatagataagtgatagatagatggtagacaggtgatagataaatgactggcagatacaaagagatagatgataggttgataatagatatagataggggacaaagattgatacagatagatgattgatagatataaatagatagtagatacagataggagtaagataggtagatagataatagatggttggatggaggatagatagataaatgatggatggataaatgatggatggttggatggatgatagatacacagataaataaatgatggatggttgggtggatgataggtatatagataaatagatgtatgtttggatgaattatagatagaagatagagtgacagataatgtatggttgaatagatgatcaataattggatagatacctatgtagatagactgatgacagatggttgggtggattagataggtagttgggtagatgatagatgtatagataaatagaagatgcatggttggataggtgatagatgaatggatggatgatagatgagagatgagagatagagatgagagatagatagatagagatgagagatagatacatacatacatacatacatacatacatacatacatacacagacaaataaatgagggttgactggatggataatagatagagtttctcatgctaaggatttctccgcctcagcagtatggacatctggggcaggaggattctctatggtgggactgtcctgtgcactgtagggtgttgagcagagtccctgggctccacccacaagatgccaggagcacgcaccaccccagtggacaaccaaaaatgtctctagatatggctacattccctgcataaggctgtacctttcctgattgcgaaacactgtgctaggtaaatacacgcagcagagggtttcagaaacatgttcatttggacagtcttcttcagtgcatgatgtggaaactgagatctggggaggtaagttcacctaggtgtagagaatgtttctgcaggacataccttggtaaaattttacctggaaaaaaattggcaaaaacatcctatcaacaaaaatttctgcattcacatgaggtgatgggctgaagaggtgtttggaaacattaaaagtgtttcagagagcattcagattctagaagattaaaaaaccaagtgggattgtagtcccatttaaaaagagctatatttttatgacttagatagcattttcactgagtcaagaatagaagaatggctgggcagaatgatatgaacaaatgagaggacgtgttctcctggccgcaaaaagatcatgaagaaagtgcgaccctcaagtaaagagacctggggtttagtaatagatataatgtaatagtggtgcaggcccgtagtcacagctactcaggaggctgagctaggaggattacttgagcccaggagtttgaggctgcagtttgcaaaaaaatcatttctacctgcaacctgtcagtgcaaccttatttgaaaaaagagtttttgcagatgtaatcatgtgaaggacctggaaatgagattattctggataaggatgggttctaaatgcaataagtgtgcctataagagacaaatcaggggacacagacacagaggaggaggccatgtggagacagaggcagaaaatggagtgacatggcccagggattcctggagcccccaggatctggaagaggtaggaaggatcctcccctggaacatccagagggaactgcatacaattgtagtgcattgaacagtggcccccaaaatatatgcccatattctgactcccagatcctgggaatgggaccttatttggaaatagggtctttgcaggtgtaattaagttaaagatcttgagacgagttcatcctggattagacgggctctaaatccaataataggtgtctgtcctaagagacaaaacaggaggaacagacacaggagaaggccttgtggagatggaggcagactggagtgatgcagccacaagcccagggacatctggagccccccaggagctgggagaggcaggaaggatcctcccctagagcctccatagggagcatggccctgagacactttgatgtcagacttctggtctccaaaactgagaaggagtccattctgtttttttttttttctttctgaaggtaacatatatttttatttcttttcttattattattatactttaagttttagggtacatgtgcacaatgtgcaggtttgttacatatgtatacatgtgccatgttggtgtgctgcacccattaactcatcatttagcattaggtatatcacctaatgctatctctcctctctccccacactccaaaacagtccccgatgtgtgatgttccccttccggtgtccatgtgttctcattattcagttcccacctatgagtgagaacatgcggtgtttggtttttgtccttgtgacagtttgctgagaatgatggtttccagcttcatccaggtccctacaaaggacacgaactcatcattttttatggctgcatattattccatggtgtatatgtgccacattttcttaatccagtctatcattgttggacatttgggttggttccaagtctttgctattgtgaatagtgccacaataaacatgcatgtgcatgtgtctttatagcagcatgatttataatcctttgggtatataaccaataatgggatggctgggttaaatggtatttttagctctagatcccagaggaatagccacaccaacttccacaatggttgaactagtttacagtcccaccaacagtgtaaaagtgttcctatttctccacatcctctccagcacctgttgtttcctgactttttaatgattgccattctaactggtgtgagatggtatctcattgtggttttatttccatttctctgatggccaatgatgatgagcattttttcatgtgttttttcactgcataaatgtcttgagaagtgtctgttcatatccttctcactttttgatggggttgtttattttttttcttgtaaattagtttgagttcattgtagattctggatattagccctttgtcagacaagtaggttgcaaaaatgttctcccattctataggttgcctgttcactctgatggtggtttcatttgctgagcagaagctctttagtttaatcagatcccatttgtctattttggcttttgttgccattgtttttggtgttttagacatgaagtccttgcccatgcctatgccctgaatggaaatgcctaggtattcttctagggttttttatggttttaggtctaacatgtaagtctttaatccatcttgaattaatttttgtataaggtgtaaggaagggatccagtttcagctttctacatatggctagccagttttcccagcaccatttcttaaataaggaatcctttccccattgcttgtttttctcaggtttgtcaaagatcagatggttgtagatacgtggcattatttctgaggactctgttctgttccattggtctatatctctgttttggtaccagtaccatgctgtttttgttactgtagacttgcagtatagtttgaagtcaggtagcgtggtgcctccagctttgttctcttttggcttaggattgacttggcaatgtgggctattttttggttccatatgaactttaaagtagatttttccaattctgtgaagaaagtcattggtagcttgatggggatggaattgaatctataaatttccttaggcagtgtggccattttcatgatattgattcttcctacccatgagcatggaatgttcttcaagttgtttatatcctcttttatttcattgagcagtggtttgttgttctccttgaagaggtccttcacatcccttgtaagttggattcctaggtattttattctctttgaagcaatcgtgtatgggagttcactcaggatttggctctctgtttccctgttattggtgtgtaagaatgcttgttagttttgcacattaattttgtatcctgagactttgctgaaattgcttatcagcttaaggagattttgggctgagacaatgggtttttctagaaatacaatcatgtcatctgcaaacagggacaatttgacttcctcctttcctaattgaatgccctttattttcttctcctgcctgattgcccttgccagaacttccaacattatgttgaataggagtggtgagagagggcatccctgtcttgtgccagttttcaaagggaatgcttccagttttgtgcattcggtatgatattggctgtgggtttgtcatagatagctcttattattttgagatatgtcccatcaatacctaatttattggtagtttttagcatgaaggttgttgaattttgtcagaggcattttctgcatctattgagataatcatgtggtttttgtcattggttctgtttatatggtggattaagtttattgatttgcatatgttgaactagtcttgcatcccagggatgaagccaacttgattatggtggaaaagctttttgatgtgtttctgcattcggtttgccagtattttattgaggatttttatattaatgttcatcaaggatattggtctgaaattctctttctttgtagtgtctctgccggctttggtatcaggatgatgctggcctcattaaatgagttagggaggattccctgtttttctattgattgcaatagtttcagaaggaatagtaccagctcctccttgtatctctggtagaatatggctgtgaatccatctggtcctggacttttttggttggtaagctattaatcattccctcaatttcagagcctattattgttctattcagagattcaacttcttcctggtttagtcttgggagagtgtatgtgtcgaggaatttatccatttcttctagattttctactttatttgcatagaggtgtttatatattctctgatggtagtttatatttctgtggaatcattggcgatatcccctttgtcattttttattgcgtctatttgattcttctctcttttcttctttattagtcttgctaatggtttatgaattttgttgatcttttcaaaaagccagctcctggattcaccgaattttgaagggtttttgtgtctctatttccttcagttctgctctgatcttagttatttcttgccttctgctagcttatgaatgtgtttgctcttgtttctctagttcttttaattgtgctgtttgggtgtcaattttagatctttcctgctttctcttgtggacatttagtgctataaatttcccagtagtcattcaggagcaggttgttcagtttccatgtagttgagcggtttggaatgagtttcttaatcctgagttctagtttgattgcactgtggtctgagagacagtttgttataatttctgttcttttgtatttcctgaggagtgctttacttacagatatgtggtcaattttggaataggtgtggtgctgaaaagaatgtacattctgttgatttggggtggagagttctatagatgtatattaggtcctcttggtgcagatctgagttcaattcctagatatctttcttaactttctgtctcgttgatctgtctaatgttgacagtggggtattaaagtctcctattattgtgtgggagtctaagtctcttcataggtcgctaaagacttgttttatgaatctgggtgctcctgtattgggtgcatatatatttaggatagttagctcttcttgttgaattgatccctttatcattatgtaaaggccttctttgtctcttttgatctttgttggtttaaagtctattttatcagagactagcattgcaagctatgcctttttttgttttccatttgcttggtagatcttcctccactgctttattttgagcctatgtgtgtctctgcatgtaagatgggtttcctgaatacagcacactgatgggtctttactctttattcaagttgccagtctgtgtctttcaattggagaatttagcccatttacatttaagattagtactgttatgtgtgaatttgatcatgtcattatgatgttagctggttattttgctcgatagttgaagcagtttcttcctagccttgaaggtctttacaatttggcatgtttttgcagtggcattaccgggtgttcatttccatgttcagtgcttccttcaggagctcttttagggcaggcctggttgcaacaaaatctctcagtatttgcttgtctgtaaaggattttatttctccttcacttatgaagcttagtttggctggatatgaaattctgggttgaaacttcttttctttaatgttgaatattggcccccactctcttcagtcttgtagagtttctgctgagatatccactgttagtctgatgggcatccctttgtgggtaacccgacattcctccctggctgcacttaatattttttccttcatttcaactttgttgaatctgacaattatgtgttttggagttgctcttctcagtgagtatctttgtggcattctctgtatttcctgaattttaatgttggccttccttgcttgattggggaagttctcctggatagtatcctgtagcatgttttccaacttggttccattctcccctcattttcaggtatgccatttagatgtagatttgctcttttcacatagtcccatatttcttggaggctttgttcttgtctttttattcatttttctctaaacttctcttcatgcttcatttcattcatttcatcttccatcactgatggaagttgattgcattggttactgaggcttgtgcattcatcacatagttcttgtgccgtggttttcagctccgtcaggccctttaaggacttctctgcattggttattctaattagccattcatgtaattttttttcaaagtttttaacttctttgccatgcgttcaaacttcctcctttagctgggagtagtttaatcttctgaagtcttcctctctcaacttgtcaaagtcattctccatcctgctttgttccattgctggtgaggagctgtgtcccttttgaggaggaaaggcactctgatttttagagtttccagtttttttgctctgttttttccccatctttgtggttttatctacctttggtctttgatgatggtgacgtacagatggggttctggtgtcaatgtcctttctttttgttagttttccttctaacagtaaggaccctcagctgcaggtctgttggagtttactggaggtccactccagaccttgtttgcctgggtatcagcaatggtggctgcagaacagtggatattgttgaaccacaaatgctgctgcctgatcgttcctctagaagttttgtcttggaggagtacccggccgtgtgaggtgtctgtccacctctgctgggggtgcgtcccagttaggctactcagaggtcagggacccacttgaggaggcagtctgcctgttctcagatctcaagctgcatgctgggagaaccactactctcttcaaagctgtcagacagggacaattaaatctgcagaggttattgctgtcctttgtttctctgtgccctgccctcagaggtggagtctacagaggcaggcaggcctccttgagctgcagtgggctccacccagttcgagcttccaggctgctttgtttacctactcaaacctgagcaatagcaggtgcccctcccccagcctcgctgccaccttgcagtttgatctcagactgctgtgctagcaatgagtgaggctccgtgggcataggaccctccaagccaggtgcgggatataatctcctgttgtgccatttgataagccctttggaaaagcacagtattagggtgggggtgacccaattttccaggtgccatctgtcacccctttctttgactaggaaagggaattccctgacctcttgcacttccccagtgggcgatgcctcaccctctttggctcacacatgttgtgctgcacccactgtcctgcacccactgtctggcactccctagtgagatgaacccagtacctcagttggaaatgcagaaatcagccatcttctgcatcgctcaccctgggagctgtagactggagctgttcctattcggccatcttggctccacccccatttctgttgtttttaagcccctattttgaggtgattggttacagaagccctgagaaataaatgcaaatatttaaaattttcttgtagggatggtcatgatgataggtacttaaaacctcatgacaggtaaaataaatgatttaaaccagtttgtccagaacacaaaggtgtgatttgagcagatcattaatcagaatcacatatgactattattatttgtaaataatatactaactacaagacagttgtttttttccccctaaatggctaagttctaacatctggtatatgttcttgtaaatctgtggacacaagcaaaatccctagctaaccatccattgtcaccatttaattactctcaggccctcacagaaaaacaaaacttcaatcaggctctagtccttgaagtctggtttgtaattgcaaaggctgttcttgtttaaatgaagctgggctgaatgtgggacaagatgaggaagaccccaatcctgctgctgaattcagtctccaagacactgaaccccacaagattgttttctgcacttttgtcatttaagacccaagtctcacctgtaatcccagaactttgggagaccaaggcctgcagattgcttgagcccaggagttcaagaccagcctgcgcaatatagcaggatcacatctctacagaaaatacaaaaattagctaggtgtggtggtgcatgactgtagtcccaactactctgtagactgaggtaggaggatcacttaagcccaagacaatgaggctacagtgagccgagatcacaccactgcaccccagcctgggtgatagagaaagattgtctccaaaaataaaaaatgacccaagtcttttggaggtggaagttcagtaacagattaatgatgaaactaagagggctagtgttagtgagatcctggatggccagcacaaactgactgctttgggaaaaaaaaaaaaaagttggtttatcttctcctgagaggttgttcatcttactttttagtagagtctttttaaaattaaccttgttagaacacaagaaacctgtgtttcttgttggctttatgttgtcatctcctggattgatttaaacatcctcaactccaagtgtcttcatttcctggggctgcccttgcaagtgaccacagaacctatggcttaaaacaaaaggaattgattctctcacagttctggagaccagcagtctgaggtgaaagagtggacagagctatgctacctctggaggttctaggaaaggattcttcctgcctctcccagctcctggaggctctaggcatctctgggcttgttgctgcatcacttcagtgtctgcctccatctccaggtggcttactcctctccatctgtgtctccttttgtgtctcttagaaacctgctgtttaatctagggccacactaatccaggatgatctcatcttgagatccttgacttaagtatacctgcaaagccctcatttccaaataaggttccattcacatattctggggataggatgtggacatatctttttgggacactatggttcaatccattacaattgtattccactccttctggaggctctagaggaggatccttcctgtctctctcagctcctgtggactctaagcataattgggcttgtatctgcctcactccagtttctacctccatctccacatggccttctcctctgtgtctgttctcttctgtctcttttctctctctttttttaattggagacagaggttcactcttgttgcctaggctggagtgcaatgtcacgattttggttcactgaaacctctgcctcctgggttcaggcaattctccttcctcagcctcttggttttctgtaaggacatttgtccatagatttagggcttatctaatccaggataatatcattttgagatacttaagccatttatatcttatctaaataagttcacataagttccagaggttaggacatagacacatctttgagggccaccattccacctgctacacaaggctctattaatatctctgacctacaattcagaatctctgagagagaagcctgggtgagtacgaagtgcagcaagaatatgatgaggaagtggcctctttagtgctggaattcatttgttcctgaagtagtttggcaaaactatactgtgatccatcacatatttcttatgatttaaccctcaatggggcaacctattttgctaatttttatcatattgtgtggtacctccccccaagaagacattagaaccttgtgtgttgttgaaattctgcatgcttctgttttcagatttgtgggaaagaggaaaattataggatatttatctcataaagccattgtgaaaatagaatatgagattcttagaacaaagcctgtcacatcacaagtactcagtatatgttggttgtttccatacttattgctgtcatttctccagtagtttgaagagtgatggtttccaaagtatgttcaagttaagcactacaaccactcttgggagagttgaattcggatgaagcgttcttagatatgaccactatactggtgtgggattagagcatcggtgtaggttcagtcctacaccatccaacttcagctgaagcttatgcatcctaagccatgtagcagaaccagaactagaaaccaaaactagaacaaacatgtgcgctgtgctgtgttgtgcctaaccatggagctttgggaaaacatggcctatcaaacaaggttttgagtggatgggacacttgggaaaacatgcacaattaaactaggctttgagtggatgaggagccttggaaaagcatggctgatcaacaaggctttgggtggatgaaaagacttgggaaaccatggctgatcgaacaaggctttgagtggattatgagccttggaaaaatatggtccatgaaacaaagctttgggtggatggggagctttgggaaaacatattccatcacacaaggctttgagtggatgaagagccttgggaaaacatagccgaccaaacaagacttcaagtggatgagacaaaggcttgaatttatttcctgttctttaatagctgtgtgaatgtagatgtcctctacttaaacttctgtttctttgtgtatatcaagtggggatgacaccactcattttaccaggccattgggaaaaccacagatatatcataattcataggacaaaacttgaaagttccattaaaaaaagaagaaaaacactgaagctgtgtccactctctggtaggacagcataaattatctgagagaaaaatgtaccctttttttgttttaggaaacattctatgatgcttcctaattatataaacagaaaaaacttcaaggactacatagttggagttttcagtcaaggggaattactatatggtgttgtctacagaaagaaaggaagggctgaggagcccaactagacaagtaggcacctcagagagtgagtcacagactgatgatgtatcaattgtggctgcaacactgtggcccaagactgacacaggaaatgcactcaccttccatttctcccacttcttctccaaagtccgatacctgccccattgctgacttcagcaacaagtcacctgataggagctctgcaggggacattctccttgccatgcagagctgaggatatacaggaagtagatcaggaaaacgggtgccaggaaatctagtataaaagccaacaattacttacaatgcttgattgaagacatttgtctagtttctttttttatcctttggggcattttttaaaatatatatatattttattatactttcagttctagggtacatgtgcacaatgtgcaggtttgttacataaatatacatgtgctatgttggtgtgctgcacccattaactcgtcatttacattgggtatatctcctaatgttatccctcccccctccccccaccccactacaggccccggtgtgtgatgttccccttcctgtgtcccagtgttctcattgttcaattcccacctataagtgagaacatgcagtgtttggtttttttgtccttgtgatagtttgctgagaatgatggtttccagcttcatccatgttcctacaaaggacatgaactcaacattttttatggctgcatactactccatggtggtgccacattttcttaatccagcctctcattgttggacatttgggttggttccaagtctttgttattgtgagcagtgccacaataaacatacatgtgcatgtgtctttatagcagcatgatttatattctttgggtatatacctagtaattggatggctgggtcaagtgctatttctagttctaaatccttgaggaatccccacactgtcttccacaatggttgaaccagtttacagtcccaccaatagggtaaaagtgttcctattcctccacatcctctccagcacctgttgtttcttgactttttaatgattgccatactaaatggtgtgagatgatatcttactgtggttttgatttgcatttctccgatggccagtgatgaccattttctgatgtgtcttttggctgcataaatgtcttcttttagaagtgtctgttcacattcttcgcccactttttgatggggttgtttctttttttcttctaaatttgttagagttctttgtagattctggatattagctctttgtcagatgagtagattgaaaaaattttctgccactgtgtaggttgcctggtcactctgatggtaatttcttctgctgtgcagaacctctttagtttagttagatcccatttgtcaattctggcttctgttgccattgcttttggtgtcttagacatgaagtccttgcccatgcctatgtcctgaatggtattgcctggcttttcttctagggtttttatggttttagatctaacatgtaagtctttaatccatcttgaattaatttttgtatgagatgtaaggaagggatccagtttcagctttctacatatggctagccaattttcccagcaccatttgttaaatagggaatcctttccccgtttcttgtttttgtcaggtttgtcaaagatcagatagtggtagatgtgtggtattatttctgagggctctgttctgttccataggtctatatctctgtcttggtaccagtaccatgctgtttcggttactgtagccttgtagtatagtttgaagtcaggtagtgtgatgcctccagctttgttcttttggcttaggattgacgtgccaatgcgggctcttttttagttccatatgaactttgaagtagtttttttccaattctgtgaagaaagtcattggtagcttgatggggatgacattgagtctataaattaccttgggcagtatggccattttcctgatattgattcttcctacccgtgagcatggaaagttcttccacttgtttgtgtcctctttcatttcattgagcagtggtttgtagttctccttgaagaagtccttcacatcccttgtaagttggattcctacatattttattctctttgaagcagttgtgaatgggagttcactcatgatttggctgtctctctgttattggtgtataagaatgcttgtgatttttgcacattaattttgtatcctgagactctgctgaaattgcttatcagcttaaggagattttgggctgagatgatggggttttccagaaatacaatcatgtaatctgcaaatagggacaatttgactaccttttttcctaagtgaataccctctatttctttctcctgcctgattgctctggccagaaattccaacactatgttgaacaaaagtggtgagagtgggcatccctgttttgtgccagttttccaaggcaatgcttccagtttttgcgcattcagtatgatattggctatgggtttgtcataaatagctctattattttgagatacgtcccatcaatacctaatttattgagagtttttgcatgaagggctgctgaattttgtcaaaggccttttctgcacctattgagataatcatgtggtttttgtctttggctgtgtttatatgctggattacatttattaagttgtgtatattgtaccagccttgcatcccagggatgaagcccacttgatcatggtggataagctttttgatgtactgctggattcggtttgccagtattttattgaggatttttgcatcaatgttcatcaaggatattggtctaaaattctcttttttagttgtgtctctgccaggctttggtatcaggatgatgctggcctcatcaaatgagttagggaggattccctctttttctattgattggaatagtttcagaaggaatggtagcagttcctccttgtacctctggtagaattcggccatggatccatctggtcgtgtacttttttttgttggtaagctattaattattgcctaaatttcagagccttttattggtctattcagagattcaacttcttcctggtttagactttggagggtgtatgtgtcgagtaatttatccatttcttctagattttctagtttattttcattgaggtgtttatattattctctgatggtagtttgtatttctgtgggatcggtggtgatatcccctttatcattttttattgggtctattagattcttttctcttttcttcctttttagtcttgctagtggtctatcaattttgttgatcttttcaaaaaactagcacctggattcattgattttttgaaggggttttgtgtctctatctccttcagttctgctctgatcttagttatttcttgccttctgctagcttttgaatgtgtttggtcttgcttttctagttcttttaattgtgatattagggtgtcaattttgggtctttcgtgctttctcttgtgggcatttagtgctagaaatttccctctacacactgctttgaatgagtcccagagattctggtatgttgtgtctttgttctagctggtttcaaagaacatctttatttctggttttatatccttatgtatccaatagtcattcaggagcaggttgttcagtttccacgtatttgagtgtttttcagtgggtttcctaatcctgaggtctaatttgattgcactgtggtctgagagaccacttgttataatttctgttcttttgtatttgctgaggagtgctgtacttccaactacgttgtcaattttggaataggtgcagcatggtgctgagaagaatgtatattctgttgatttggggtggagatttctgtagatgtctattaggtccactgggtgcagagctgaatttacttcctggatatccttgttacctttctctttcattgatctgtctattgttgacagtggagtgttaaagtctcccattattattgtgtgggagtctaagtctctttttcagttcactaaggacttgctttatgaatctgggtgctcctgtattgggtgcatatatatttaggatagttagctcttcttgttgaattgatccctttatcattatgtaatggcctgctttgtctcttttgatctttgttgatttaaagtccgttttatcagagactagcattgcaagctatgcctttttttgttttccattttcttggtagatcttcctccatccctttattttgagcctatgtgtgtctctgcacgtgagatgggtttcctgaatacaacacaatgattggtcttgactctttatccaatttgccagtctgtgtcttttaattggaacatttagcccattttcatttaacgttaatattgttatgtgtgaatttgatcctgtcattatgatgttagctggttattttgctcagtagttgatgcagtttcttcctagcatcaatggtgtttacaatcagccatttttctgccatggctggtactgatttttcctttccatgtttagtgcttcgttcagcagctcttttagggcaggcctggttgtgacagaatctctcagcatttgcttgcctgtacaggattttatttctccttcacttatgaagcttagtttggctggatatgaaattctagtttgaaaattcttttctttaagaatgttgtttttctcaggtttgtcaaagatcagatagttgtagatatgtggctttatttctgaggactctgtcctgttccattgatctatatctctgttttcgtaccagtaccatgctgttttggttactgtaaccttgtagtatagtttcaagtcaggtagtgtgatgcctccagctttgttttttggcttagggttggcttggcggtgtgggctcttttttggttctatatgaactttaaagtagttttctccaattctgtgaagaaagtcattggtagcttgatgggaatggcattgaatctgtaaattaccttgggcagtatggccattttcacgatattaattcttcctacccatgagcatggaatattcttccaattgtttgtatcctcttttatttccttgagcagtggtttgtagttctccttgaagaggacattcacatcccttgtaagttggattcctaggtattttattctctttgaagcaactgtgaatgggagttcactcatgattaggctctctgtttgtttgtctgtcattggtgtatgagaatgtttgtgatctttgtacattgattttgtatcctgagactttgctgaagtttcttatcagcttatctttgacaaaactgagaaaaacaagcaatggggaaaggattccctatttaatacatggtgctgggaaaactggctagccatatgtagaaagctgaaactggatcccttccttacaccttatacaaaaatcaattcaagatggattaaggacttaaacgttagacctaaagccatcaaaaccctagaaggaaacctaggcaataccattcaggacataggcatgggcaaggacttcatgtctaaaacaccaaaagcaatggcaacaaaagacaaaattgacaaatgggatctaattaaactaaatagcttctgtgcagcaaaagaaactaccatcagagtgaacaggcaacctacaaaatgggagaaaattttcgcaacctactcatctgacaaagggctaatatccagaatatacaatgaactcaaaccaatttacaagaaaaaaaacaacaacgctatcaaaaagtgggcaaaggacatgaacagacacctctcaagagaagacatttatgcagccaaagaacacatgaaaaagtgctcaccatcactagccatcagagaagtgcgagtcaaaaccacaatgagatacgctctcacaccagttagaatggctatcattcaaaagtcaggaaacaacaagtgctggagaggatgtggagaaatgggaacacttttacactgttggtgggactgtaaagtagttcaaccattgtggaagtcagtgtggcgattcctcagggatctagaactagtaataccatttgacccagtcatcccattactgggtatatacccaaaggactgtaaatcatgctgctttaaagtcacatgcacacatatgtttattgcggcattattcacaatagcaaagacttggaaccaacccaaatgtccaacaatgatagactggattaagaaaatgtggcacatatacaccatggaatactatgcagccataaaaaatgatgagttcatgtcctttgtagggacatggatgaaattggaaatcatcattctcagtaaactatggcaagaacagacaaccaaacaccacatattctcactcataggtgggaattgaacaatgagaacacatggatacaggaaggggaacatcacactctggtgactgttgtggggtggggggagggggaggatagcatttggagatatgcctaatgctagatgacgagttagtgtgtccagcacaccagcatggcacatgtatacatatgtaactaacctgcacattgtgcacatgtaccctaaaactttaagtataataataaataaataaaaagattaaaaaaaagagaatgttgaatattagcccccactctcttctgtcttgcagagattctgctgacagatcagcttttagtctgatgggcttccctttgtgggcaacccgacctttctctctggctgcccttaacattttttctttcatttcagctttggtgaatctgacaattatgtgtcttggagttgctcttctcgaggagtatctttgtggcactctctgtatttcccaaatgtgaatgttggcctgccttgctagattggggaagttctcctgggtgatatcctgcagagtgttttccaacttggttccattctccctgtcactttcagttacaccaattagacatagatttgttctttcacgtagccccatatttcttgg

SEQ ID NO: 891 - DNA, 602 bp, Homo sapiens
ccgaataccaggatacaacggtttgaggttctcaagaacggtaccttagtgataaggaagtttcaagtgcaagatcgaggccagtatatgtgcaccgccagcaacctgtacggcctggacaggatggtggtctttctctgggtcaccgtgcagcaacctcaaatcctagcctcccactaccaggacgtcaccgtctacctgggagacaccattacaatggagtgtctggcgaaagggaccccagccccccaaatttcctggatcttccgtgacaggagggtgtggcaaactctgtcctccgtggagggccggatcaccctgcaccaaaaccggaccctttccatcaaggaggcgtccttctcagacagaggcgtctataagtgcgtggccagcaacgcaacccgggcggacagcgtgtccatccgcctacacgtggcggcactgccccccattatccaccaggagaagctgtagaacatctcgctgcccccggggctcagcattcacattcactgcactgccaaagctgcgcccctgcccagcgtgctctgggtgctcggggatggtacccaaatccgcccctcgcatttcctccaccggaa

SEQ ID NO: 892 - DNA, 25393 bp, Homo sapiens
ttttcttttttttttttttaattatactttaagttctagggtacatgtgcacaatgtgcaggttagttacatatgtatacatgtgccatgctggtgcgctgcacccactaactcgtcatctagcattaggtatatctcccaatgctatccctcccccctacccccaccccaaaacagtccccagagtgtgatattccccttcctgtgtccatgtgatctcattgttcaattcccacctatgagtgaaaatatacggtgtttggtttctctttcttgcgatagtttactgagaatgatgatttccaatttcatccatatccctacaaaggacatgaactcatcattttttatggctgcatagtattccatggtgtatatgtgccacattttcttaatccagtctatcattgttggacattttggttggttccaagtctttgctattgtgaataatgccacaataaacatacgtgtgcatgtgtctttatagcagcatgatttatagtcctttgggtatatacccagtaaggggatggctgggtcaaatggtatttccagttctagatccctgaggaatcgccacactgacttccacagtggttgaactagttgacagtcccaccaacagtgtaaaagtgttcctatttctccacatcctctccagcacctgttgtttcctgactttttaatgattgccattgtaactggtgtgagatggtatctcattgtggttttgatttgcatttctctgatggccagtgatgatggacattttttcatgtgttttttggctgcataaatgtcttcttttgagaagtgtctgttgatgtccttcacccactttttgatggggttgtttgtttttttcttgtaaatttgtttgagttcattgtagattctggatattagccctttgtcagatgagtaggttgtgaaagttttctcccatgttgtaggttgcctgttcactctgacggtagattcttttgctgtgcagaagctctttagtttaattagatccaatttgtcaattttgtcctttgttgccattgcttttggtgttttagacatgaagtccttgcccatgcctatgtcctgaatggtaacgcctaggttttcttctagggttttgatggttttaggtctaatgtttaagtctttaatccatcttgaattgatttttgtataaggtgtaaggaagagatccagtttcagctttctacatatggctagccagttttcccagcaccatttattaaatagggaatcctttccccactgcttgtttttctcaggtttgccaaagatcagatagttgtagatatgcgacattatttctgagttctctgttctgttccattgatctatatctctgttttggtaccagtaccatgctgttttggttactgtagccttgtattatagtttgaagtcaggtagtgtgatgcctccagctttgttcttttggcttaggattgatttggcgatgtgggctcttttttggttccatatgaactttaaagcagttttttccaattctgtgaggaaagtaattggtagcttgatggggatggcattgaatctgtaaattacctttggcagtatggccattttcacgatattgattcttcctacccattagcatggagtgttcttccatttgtttgtatcctcttttatttccttgagcagtggtttgtagttctccttgaagaggtccttcacataccttgtaagttggattcctaggtattttattctctttgaagcaattgtgaatgggagttcactcatgatttggctctctgtttgtctgttgttggtgtataagaatgcttgtgatttttgtacattgattttgtatcctgagactttgctgaagttgcttatcagcttaaggagattttgggctgagacaatggggttttctagatatacagtcatgtcgtctgcaaacagggacaatttgacttcctcttttcctaattgaataccctttatttccttttcctgcctaattgccctggccagaacttccaacactaggttgaataagagtggtgagagagagggcatccctgtcttgtgccagttttcaaagggaatgcttccagtttttgcccattcagtatgatattggctgtgggtttgtcatagatagctcttattattttgaaatacgtcccgtcaatacctattttattgagagtttttagcatgaagagttgttgaattttgtcaaaggccttttctgcatctattgagataaacatgtggtttctgtctttggttctgtttatatgctggattacatttattgatttgtgtaaattgaaccaggcttgcatcccagggatgaagcccacttgatcatggtgaataagcttattgatgtgctgctgggtttgttttgccagtattttattgaggatttttccatcaatgctcatcaaggatattggtctaaaattctctttttttgttgtgctctgcctggctttggtatcaggatgatgctgtcctcataaaaagagttagggaggattccctctttttctattgattggaatagtttcagagggaatggtaccagttcctccttgtacttctggtggaattcggctgtgaatccatctggtcctggactctttttggttggtaaactattgattattgccacaatttcagatcctgttattggtctattcataggttcaactttttcctggtttagtcttgggagagtgtatgtgtccaggaatttatccgtttcttctagattttctagtttatttgcatagtggtgtttgtagtattctctgatggtagtttgtatttctgtgggatcggtggtgttatcccctttatcattttttattgcatctatttgattcttctctcttttttctttattagtcttgctagcagtctataagttttgttgatcctttcaaaaaaccagctcctggattcattaattttttgaagggttttttgtgtctctatttccttcagttctgctctgattttagttatttcttgccttctgctagcttttgaatgtgctcttgcttttctagttcttttaattgtgatgttagggtgtcaaatttggatctttcctgctttctcttatgggtatttagtgctataaatttccctctacacactgctttgaatgtgtcccagagattctggtatgttgggtctttgttctcgttggtttcaaagaacatctttatttctgccttcatttcgttatgtacccagtagtcattcaggagcaggttgttcagtttccatgtagttaagcagttttgagtgagattcttaatcctgagttctagtttgtatgcactgtggtctgagagatagtttgttataatttctgttcttttacatttgctgaggagagctttacttccaagtatgtggtcaattttggaataggtgctgtggtgctgaaaaaaatgtatattctgttgatttggggtggagagttctgtagatgtctattaggtccgcttggtgcagagccgagttcaattcctgagtatccttgttgacttgctgtctcgttgatctgtctaatgttgacagtggggtgttaaagtctcccattattaatgtgtgggagtctaagtctctttgtaggtcactcaggacttgctttatgaatcttggtgctcctgtattgggtgcatatatatttaggatagttagctcttcttgttgaattgatcactttaccaatatgtaatggccttctttgtctctttttatctttgttggtttaaagtctgtattatgagagactaggattgcaacccctgcctttttttgttttccatttgcttggttgatcttcctccatccttttattttgagcctgtatgtgtctcgcacgtgagatgggtttcctgaatacagcacactgatgggtcttgattctgtatccaatttgccagtctgtgtcttttaattggagaatttagtccatttacctttaaagttaatattgttatgtgtgaatttgatcctgtcattatgatgctagctggttattttgattgttagttgatgcagtttcttcctagtcttgatggtctttacaatttggcatgattttgcagtggctgttactggttgttcctttccatgtttagcgcttccttcaggagctcttttagggcaggcctgatggtgacaaaatctctcagcatttgcttttctgtaaagtattttatttctcctttgcttatgaagcttagtttggctggatatgaaattctgggttgaaaattcttttctttaagaatgttgaatattggcccccactctcttctggcttgtagggtttctgccgagagatccgcttgaatctgaacattggccttccttgctagattggggaagttctcctggataatatcctgcagagtgttttccaacatggttccattctccccatcactttcaggtacaccaatcaggcgtagatttggtcttttcacatagtcccatatttcttggaggctttgctcatttctttttattcttttttctctaaacttcccttctcacttcatttcattcatttcaccttccagtactgatgccctttcttgctgttgatcacatcggctcctgaggcttctgcattctttacgtagttcttgagccttggttttcagctccatcagctcctttaagcacttctctgtattggttattctagttatacattcttctaaagttttttcaaagttttcaacttctttgcctttggtttgaatgtcctcccatagctcagaataatttgattgtctgaagccttcttctctcagctcgtcaaagtcattctccgtccagttttcttctgttgctggtgaggaactgcattcctttggaggaggagaggctctctgctttttagagtttccagtttttctgttctgttttttcgccatctttgtggttttatctacttttggtgtttgatgatggtgatgtacagatgagtttttggtgtggatgttctttctgtttgttagttttccttctaacagacaggacactcagccgcaggtctgttggaatacccggctgtgtgaggtgtcagtctgcccctgctgggtacctcccagttaggctgctcgggggtcaggtgtcagggacccacttgaagaggcagtctgccccttctcagatctccagctgcgtgttgggagaaccactgctctcttcaaagctgtcagacagggacatttaagtctgcaaaggttactgctgtctttttgtttgtctgtgccctgcccccagaggtggagcctacagaggcatgcaggcctccttgagctgtggtgggctccacccagttcaagcttcctggctgctttgtttacctaagcaagcctgggcaatggcgggcgcccctcccccagcctcgctgccaccttgcagtttgatctcagactgctgtgctagcaatcagcgagactctgtgggtgtaggaccctccgagccaggtgcgggatataatctcgtggtgcaccgtttttttaagcccattggaaaaacgcagtattcaggtgggagtgacccaattttccacgtgccatctgtcaccccttcctttgactcggaaaggaactccctgaccccttgcgcttcccaagtgaggcaatgccttgccctgctttggctgccacacagtgcacgcatccactgacctgcgcccactgtctggcactccccaatgagatgaacccagtacctcagatggaaatgcagaaatcaccgtcttctgcgtcgctcacactgggagctgtagaccggagctgttgctattcggccatcttcaacaatgctattttcaaggacaaaagagggtcacattaatttgggtttccatcagagtggttgaaaaaactgctttcatcaccttctctcaatgattagcttctctacacatttttaacaggcaaggaaactgagtcaaaggcaatgcttctgatgacagatttggcaggcaggaaggcaggatttgagtgtcagttgcatgtagtgacaatttcagtattcagcaagacagcttggggactgagaagcagtgctctaggaaatcattcaggatttttcttttttatattgttttcaaagagacacctgtatatacatgtatttgtattccacaaatatgcaaaactgtccttcttttgcttcccctgagagtaaggaaaaaggcaaacaagataaatatttgggaaaaatattactgtcagcatttcaagaaatgcagtgtcacaaattgttaaagaatgtcggtcatggaaactaaagaatgctggtttatttttttttaactctgtggaaggcatagagcatgtctctcattcatgaatccacttatttgcttaaatatgtctgcacagcccttacttgtgctggatatcaacagagcctgaggaagcagagaggaggaggaggaggtggtgcttggagtgtttatgctcaatagactggttcttcagatggtgcagggtctctcaaaatgcccatgaatgacatttggggatggatgattctctgggcttgggtgtcctgtgtagggtgttgagaagtatccctgggctctacctgccacatgctagcatccccccacccccaaaaagttgtgatgaccaaaatgtctctggacattaccaaatgcccctttagagggtgcaaacttgctcctgagagccactgatgcggacagattagattggtaaatagataactgatagatgattgatatagatagataagtgatagatagatggtagacaggtgatagataaatgactggcagatacaaagagatagatgataggttgataatagatatagataggggacaaagattgatacagatagatgattgatagatataaatagatagtagatacagataggagtaagataggtagatagataatagatggttggatggaggatagatagataaatgatggatggataaatgatggatggttggatggatgatagatacacagataaataaatgatggatggttgggtggatgataggtatatagataaatagatgtatgtttggatgaattatagatagaagatagagtgacagataatgtatggttgaatagatgatcaataattggatagatacctatgtagatagactgatgacagatggttgggtggattagataggtagttgggtagatgatagatgtatagataaatagaagatgcatggttggataggtgatagatgaatggatggatgatagatgagagatgagagatagagatgagagatagatagatagagatgagagatagatacatacatacatacatacatacatacatacatacatacacagacaaataaatgagggttgactggatggataatagatagagtttctcatgctaaggatttctccgcctcagcagtatggacatctggggcaggaggattctctatggtgggactgtcctgtgcactgtagggtgttgagcagagtccctgggctccacccacaagatgccaggagcacgcaccaccccagtggacaaccaaaaatgtctctagatatggctacattccctgcataaggctgtacctttcctgattgcgaaacactgtgctaggtaaatacacgcagcagagggtttcagaaacatgttcatttggacagtcttcttcagtgcatgatgtggaaactgagatctggggaggtaagttcacctaggtgtagagaatgtttctgcaggacataccttggtaaaattttacctggaaaaaaattggcaaaaacatcctatcaacaaaaatttctgcattcacatgaggtgatgggctgaagaggtgtttggaaacattaaaagtgtttcagagagcattcagattctagaagattaaaaaaccaagtgggattgtagtcccatttaaaaagagctatatttttatgacttagatagcattttcactgagtcaagaatagaagaatggctgggcagaatgatatgaacaaatgagaggacgtgttctcctggccgcaaaaagatcatgaagaaagtgcgaccctcaagtaaagagacctggggtttagtaatagatataatgtaatagtggtgcaggcccgtagtcacagctactcaggaggctgagctaggaggattacttgagcccaggagtttgaggctgcagtttgcaaaaaaatcatttctacctgcaacctgtcagtgcaaccttatttgaaaaaagagtttttgcagatgtaatcatgtgaaggacctggaaatgagattattctggataaggatgggttctaaatgcaataagtgtgcctataagagacaaatcaggggacacagacacagaggaggaggccatgtggagacagaggcagaaaatggagtgacatggcccagggattcctggagcccccaggatctggaagaggtaggaaggatcctcccctggaacatccagagggaactgcatacaattgtagtgcattgaacagtggcccccaaaatatatgcccatattctgactcccagatcctgggaatgggaccttatttggaaatagggtctttgcaggtgtaattaagttaaagatcttgagacgagttcatcctggattagacgggctctaaatccaataataggtgtctgtcctaagagacaaaacaggaggaacagacacaggagaaggccttgtggagatggaggcagactggagtgatgcagccacaagcccagggacatctggagccccccaggagctgggagaggcaggaaggatcctcccctagagcctccatagggagcatggccctgagacactttgatgtcagacttctggtctccaaaactgagaaggagtccattctgtttttttttttttctttctgaaggtaacatatatttttatttcttttcttattattattatactttaagttttagggtacatgtgcacaatgtgcaggtttgttacatatgtatacatgtgccatgttggtgtgctgcacccattaactcatcatttagcattaggtatatcacctaatgctatctctcctctctccccacactccaaaacagtccccgatgtgtgatgttccccttccggtgtccatgtgttctcattattcagttcccacctatgagtgagaacatgcggtgtttggtttttgtccttgtgacagtttgctgagaatgatggtttccagcttcatccaggtccctacaaaggacacgaactcatcattttttatggctgcatattattccatggtgtatatgtgccacattttcttaatccagtctatcattgttggacatttgggttggttccaagtctttgctattgtgaatagtgccacaataaacatgcatgtgcatgtgtctttatagcagcatgatttataatcctttgggtatataaccaataatgggatggctgggttaaatggtatttttagctctagatcccagaggaatagccacaccaacttccacaatggttgaactagtttacagtcccaccaacagtgtaaaagtgttcctatttctccacatcctctccagcacctgttgtttcctgactttttaatgattgccattctaactggtgtgagatggtatctcattgtggttttatttccatttctctgatggccaatgatgatgagcattttttcatgtgttttttcactgcataaatgtcttgagaagtgtctgttcatatccttctcactttttgatggggttgtttattttttttcttgtaaattagtttgagttcattgtagattctggatattagccctttgtcagacaagtaggttgcaaaaatgttctcccattctataggttgcctgttcactctgatggtggtttcatttgctgagcagaagctctttagtttaatcagatcccatttgtctattttggcttttgttgccattgtttttggtgttttagacatgaagtccttgcccatgcctatgccctgaatggaaatgcctaggtattcttctagggttttttatggttttaggtctaacatgtaagtctttaatccatcttgaattaatttttgtataaggtgtaaggaagggatccagtttcagctttctacatatggctagccagttttcccagcaccatttcttaaataaggaatcctttccccattgcttgtttttctcaggtttgtcaaagatcagatggttgtagatacgtggcattatttctgaggactctgttctgttccattggtctatatctctgttttggtaccagtaccatgctgtttttgttactgtagacttgcagtatagtttgaagtcaggtagcgtggtgcctccagctttgttctcttttggcttaggattgacttggcaatgtgggctattttttggttccatatgaactttaaagtagatttttccaattctgtgaagaaagtcattggtagcttgatggggatggaattgaatctataaatttccttaggcagtgtggccattttcatgatattgattcttcctacccatgagcatggaatgttcttcaagttgtttatatcctcttttatttcattgagcagtggtttgttgttctccttgaagaggtccttcacatcccttgtaagttggattcctaggtattttattctctttgaagcaatcgtgtatgggagttcactcaggatttggctctctgtttccctgttattggtgtgtaagaatgcttgttagttttgcacattaattttgtatcctgagactttgctgaaattgcttatcagcttaaggagattttgggctgagacaatgggtttttctagaaatacaatcatgtcatctgcaaacagggacaatttgacttcctcctttcctaattgaatgccctttattttcttctcctgcctgattgcccttgccagaacttccaacattatgttgaataggagtggtgagagagggcatccctgtcttgtgccagttttcaaagggaatgcttccagttttgtgcattcggtatgatattggctgtgggtttgtcatagatagctcttattattttgagatatgtcccatcaatacctaatttattggtagtttttagcatgaaggttgttgaattttgtcagaggcattttctgcatctattgagataatcatgtggtttttgtcattggttctgtttatatggtggattaagtttattgatttgcatatgttgaactagtcttgcatcccagggatgaagccaacttgattatggtggaaaagctttttgatgtgtttctgcattcggtttgccagtattttattgaggatttttatattaatgttcatcaaggatattggtctgaaattctctttctttgtagtgtctctgccggctttggtatcaggatgatgctggcctcattaaatgagttagggaggattccctgtttttctattgattgcaatagtttcagaaggaatagtaccagctcctccttgtatctctggtagaatatggctgtgaatccatctggtcctggacttttttggttggtaagctattaatcattccctcaatttcagagcctattattgttctattcagagattcaacttcttcctggtttagtcttgggagagtgtatgtgtcgaggaatttatccatttcttctagattttctactttatttgcatagaggtgtttatatattctctgatggtagtttatatttctgtggaatcattggcgatatcccctttgtcattttttattgcgtctatttgattcttctctcttttcttctttattagtcttgctaatggtttatgaattttgttgatcttttcaaaaagccagctcctggattcaccgaattttgaagggtttttgtgtctctatttccttcagttctgctctgatcttagttatttcttgccttctgctagcttatgaatgtgtttgctcttgtttctctagttcttttaattgtgctgtttgggtgtcaattttagatctttcctgctttctcttgtggacatttagtgctataaatttcccagtagtcattcaggagcaggttgttcagtttccatgtagttgagcggtttggaatgagtttcttaatcctgagttctagtttgattgcactgtggtctgagagacagtttgttataatttctgttcttttgtatttcctgaggagtgctttacttacagatatgtggtcaattttggaataggtgtggtgctgaaaagaatgtacattctgttgatttggggtggagagttctatagatgtatattaggtcctcttggtgcagatctgagttcaattcctagatatctttcttaactttctgtctcgttgatctgtctaatgttgacagtggggtattaaagtctcctattattgtgtgggagtctaagtctcttcataggtcgctaaagacttgttttatgaatctgggtgctcctgtattgggtgcatatatatttaggatagttagctcttcttgttgaattgatccctttatcattatgtaaaggccttctttgtctcttttgatctttgttggtttaaagtctattttatcagagactagcattgcaagctatgcctttttttgttttccatttgcttggtagatcttcctccactgctttattttgagcctatgtgtgtctctgcatgtaagatgggtttcctgaatacagcacactgatgggtctttactctttattcaagttgccagtctgtgtctttcaattggagaatttagcccatttacatttaagattagtactgttatgtgtgaatttgatcatgtcattatgatgttagctggttattttgctcgatagttgaagcagtttcttcctagccttgaaggtctttacaatttggcatgtttttgcagtggcattaccgggtgttcatttccatgttcagtgcttccttcaggagctcttttagggcaggcctggttgcaacaaaatctctcagtatttgcttgtctgtaaaggattttatttctccttcacttatgaagcttagtttggctggatatgaaattctgggttgaaacttcttttctttaatgttgaatattggcccccactctcttcagtcttgtagagtttctgctgagatatccactgttagtctgatgggcatccctttgtgggtaacccgacattcctccctggctgcacttaatattttttccttcatttcaactttgttgaatctgacaattatgtgttttggagttgctcttctcagtgagtatctttgtggcattctctgtatttcctgaattttaatgttggccttccttgcttgattggggaagttctcctggatagtatcctgtagcatgttttccaacttggttccattctcccctcattttcaggtatgccatttagatgtagatttgctcttttcacatagtcccatatttcttggaggctttgttcttgtctttttattcatttttctctaaacttctcttcatgcttcatttcattcatttcatcttccatcactgatggaagttgattgcattggttactgaggcttgtgcattcatcacatagttcttgtgccgtggttttcagctccgtcaggccctttaaggacttctctgcattggttattctaattagccattcatgtaattttttttcaaagtttttaacttctttgccatgcgttcaaacttcctcctttagctgggagtagtttaatcttctgaagtcttcctctctcaacttgtcaaagtcattctccatcctgctttgttccattgctggtgaggagctgtgtcccttttgaggaggaaaggcactctgatttttagagtttccagtttttttgctctgttttttccccatctttgtggttttatctacctttggtctttgatgatggtgacgtacagatggggttctggtgtcaatgtcctttctttttgttagttttccttctaacagtaaggaccctcagctgcaggtctgttggagtttactggaggtccactccagaccttgtttgcctgggtatcagcaatggtggctgcagaacagtggatattgttgaaccacaaatgctgctgcctgatcgttcctctagaagttttgtcttggaggagtacccggccgtgtgaggtgtctgtccacctctgctgggggtgcgtcccagttaggctactcagaggtcagggacccacttgaggaggcagtctgcctgttctcagatctcaagctgcatgctgggagaaccactactctcttcaaagctgtcagacagggacaattaaatctgcagaggttattgctgtcctttgtttctctgtgccctgccctcagaggtggagtctacagaggcaggcaggcctccttgagctgcagtgggctccacccagttcgagcttccaggctgctttgtttacctactcaaacctgagcaatagcaggtgcccctcccccagcctcgctgccaccttgcagtttgatctcagactgctgtgctagcaatgagtgaggctccgtgggcataggaccctccaagccaggtgcgggatataatctcctgttgtgccatttgataagccctttggaaaagcacagtattagggtgggggtgacccaattttccaggtgccatctgtcacccctttctttgactaggaaagggaattccctgacctcttgcacttccccagtgggcgatgcctcaccctctttggctcacacatgttgtgctgcacccactgtcctgcacccactgtctggcactccctagtgagatgaacccagtacctcagttggaaatgcagaaatcagccatcttctgcatcgctcaccctgggagctgtagactggagctgttcctattcggccatcttggctccacccccatttctgttgtttttaagcccctattttgaggtgattggttacagaagccctgagaaataaatgcaaatatttaaaattttcttgtagggatggtcatgatgataggtacttaaaacctcatgacaggtaaaataaatgatttaaaccagtttgtccagaacacaaaggtgtgatttgagcagatcattaatcagaatcacatatgactattattatttgtaaataatatactaactacaagacagttgtttttttccccctaaatggctaagttctaacatctggtatatgttcttgtaaatctgtggacacaagcaaaatccctagctaaccatccattgtcaccatttaattactctcaggccctcacagaaaaacaaaacttcaatcaggctctagtccttgaagtctggtttgtaattgcaaaggctgttcttgtttaaatgaagctgggctgaatgtgggacaagatgaggaagaccccaatcctgctgctgaattcagtctccaagacactgaaccccacaagattgttttctgcacttttgtcatttaagacccaagtctcacctgtaatcccagaactttgggagaccaaggcctgcagattgcttgagcccaggagttcaagaccagcctgcgcaatatagcaggatcacatctctacagaaaatacaaaaattagctaggtgtggtggtgcatgactgtagtcccaactactctgtagactgaggtaggaggatcacttaagcccaagacaatgaggctacagtgagccgagatcacaccactgcaccccagcctgggtgatagagaaagattgtctccaaaaataaaaaatgacccaagtcttttggaggtggaagttcagtaacagattaatgatgaaactaagagggctagtgttagtgagatcctggatggccagcacaaactgactgctttgggaaaaaaaaaaaaaagttggtttatcttctcctgagaggttgttcatcttactttttagtagagtctttttaaaattaaccttgttagaacacaagaaacctgtgtttcttgttggctttatgttgtcatctcctggattgatttaaacatcctcaactccaagtgtcttcatttcctggggctgcccttgcaagtgaccacagaacctatggcttaaaacaaaaggaattgattctctcacagttctggagaccagcagtctgaggtgaaagagtggacagagctatgctacctctggaggttctaggaaaggattcttcctgcctctcccagctcctggaggctctaggcatctctgggcttgttgctgcatcacttcagtgtctgcctccatctccaggtggcttactcctctccatctgtgtctccttttgtgtctcttagaaacctgctgtttaatctagggccacactaatccaggatgatctcatcttgagatccttgacttaagtatacctgcaaagccctcatttccaaataaggttccattcacatattctggggataggatgtggacatatctttttgggacactatggttcaatccattacaattgtattccactccttctggaggctctagaggaggatccttcctgtctctctcagctcctgtggactctaagcataattgggcttgtatctgcctcactccagtttctacctccatctccacatggccttctcctctgtgtctgttctcttctgtctcttttctctctctttttttaattggagacagaggttcactcttgttgcctaggctggagtgcaatgtcacgattttggttcactgaaacctctgcctcctgggttcaggcaattctccttcctcagcctcttggttttctgtaaggacatttgtccatagatttagggcttatctaatccaggataatatcattttgagatacttaagccatttatatcttatctaaataagttcacataagttccagaggttaggacatagacacatctttgagggccaccattccacctgctacacaaggctctattaatatctctgacctacaattcagaatctctgagagagaagcctgggtgagtacgaagtgcagcaagaatatgatgaggaagtggcctctttagtgctggaattcatttgttcctgaagtagtttggcaaaactatactgtgatccatcacatatttcttatgatttaaccctcaatggggcaacctattttgctaatttttatcatattgtgtggtacctccccccaagaagacattagaaccttgtgtgttgttgaaattctgcatgcttctgttttcagatttgtgggaaagaggaaaattataggatatttatctcataaagccattgtgaaaatagaatatgagattcttagaacaaagcctgtcacatcacaagtactcagtatatgttggttgtttccatacttattgctgtcatttctccagtagtttgaagagtgatggtttccaaagtatgttcaagttaagcactacaaccactcttgggagagttgaattcggatgaagcgttcttagatatgaccactatactggtgtgggattagagcatcggtgtaggttcagtcctacaccatccaacttcagctgaagcttatgcatcctaagccatgtagcagaaccagaactagaaaccaaaactagaacaaacatgtgcgctgtgctgtgttgtgcctaaccatggagctttgggaaaacatggcctatcaaacaaggttttgagtggatgggacacttgggaaaacatgcacaattaaactaggctttgagtggatgaggagccttggaaaagcatggctgatcaacaaggctttgggtggatgaaaagacttgggaaaccatggctgatcgaacaaggctttgagtggattatgagccttggaaaaatatggtccatgaaacaaagctttgggtggatggggagctttgggaaaacatattccatcacacaaggctttgagtggatgaagagccttgggaaaacatagccgaccaaacaagacttcaagtggatgagacaaaggcttgaatttatttcctgttctttaatagctgtgtgaatgtagatgtcctctacttaaacttctgtttctttgtgtatatcaagtggggatgacaccactcattttaccaggccattgggaaaaccacagatatatcataattcataggacaaaacttgaaagttccattaaaaaaagaagaaaaacactgaagctgtgtccactctctggtaggacagcataaattatctgagagaaaaatgtaccctttttttgttttaggaaacattctatgatgcttcctaattatataaacagaaaaaacttcaaggactacatagttggagttttcagtcaaggggaattactatatggtgttgtctacagaaagaaaggaagggctgaggagcccaactagacaagtaggcacctcagagagtgagtcacagactgatgatgtatcaattgtggctgcaacactgtggcccaagactgacacaggaaatgcactcaccttccatttctcccacttcttctccaaagtccgatacctgccccattgctgacttcagcaacaagtcacctgataggagctctgcaggggacattctccttgccatgcagagctgaggatatacaggaagtagatcaggaaaacgggtgccaggaaatctagtataaaagccaacaattacttacaatgcttgattgaagacatttgtctagtttctttttttatcctttggggcattttttaaaatatatatatattttattatactttcagttctagggtacatgtgcacaatgtgcaggtttgttacataaatatacatgtgctatgttggtgtgctgcacccattaactcgtcatttacattgggtatatctcctaatgttatccctcccccctccccccaccccactacaggccccggtgtgtgatgttccccttcctgtgtcccagtgttctcattgttcaattcccacctataagtgagaacatgcagtgtttggtttttttgtccttgtgatagtttgctgagaatgatggtttccagcttcatccatgttcctacaaaggacatgaactcaacattttttatggctgcatactactccatggtggtgccacattttcttaatccagcctctcattgttggacatttgggttggttccaagtctttgttattgtgagcagtgccacaataaacatacatgtgcatgtgtctttatagcagcatgatttatattctttgggtatatacctagtaattggatggctgggtcaagtgctatttctagttctaaatccttgaggaatccccacactgtcttccacaatggttgaaccagtttacagtcccaccaatagggtaaaagtgttcctattcctccacatcctctccagcacctgttgtttcttgactttttaatgattgccatactaaatggtgtgagatgatatcttactgtggttttgatttgcatttctccgatggccagtgatgaccattttctgatgtgtcttttggctgcataaatgtcttcttttagaagtgtctgttcacattcttcgcccactttttgatggggttgtttctttttttcttctaaatttgttagagttctttgtagattctggatattagctctttgtcagatgagtagattgaaaaaattttctgccactgtgtaggttgcctggtcactctgatggtaatttcttctgctgtgcagaacctctttagtttagttagatcccatttgtcaattctggcttctgttgccattgcttttggtgtcttagacatgaagtccttgcccatgcctatgtcctgaatggtattgcctggcttttcttctagggtttttatggttttagatctaacatgtaagtctttaatccatcttgaattaatttttgtatgagatgtaaggaagggatccagtttcagctttctacatatggctagccaattttcccagcaccatttgttaaatagggaatcctttccccgtttcttgtttttgtcaggtttgtcaaagatcagatagtggtagatgtgtggtattatttctgagggctctgttctgttccataggtctatatctctgtcttggtaccagtaccatgctgtttcggttactgtagccttgtagtatagtttgaagtcaggtagtgtgatgcctccagctttgttcttttggcttaggattgacgtgccaatgcgggctcttttttagttccatatgaactttgaagtagtttttttccaattctgtgaagaaagtcattggtagcttgatggggatgacattgagtctataaattaccttgggcagtatggccattttcctgatattgattcttcctacccgtgagcatggaaagttcttccacttgtttgtgtcctctttcatttcattgagcagtggtttgtagttctccttgaagaagtccttcacatcccttgtaagttggattcctacatattttattctctttgaagcagttgtgaatgggagttcactcatgatttggctgtctctctgttattggtgtataagaatgcttgtgatttttgcacattaattttgtatcctgagactctgctgaaattgcttatcagcttaaggagattttgggctgagatgatggggttttccagaaatacaatcatgtaatctgcaaatagggacaatttgactaccttttttcctaagtgaataccctctatttctttctcctgcctgattgctctggccagaaattccaacactatgttgaacaaaagtggtgagagtgggcatccctgttttgtgccagttttccaaggcaatgcttccagtttttgcgcattcagtatgatattggctatgggtttgtcataaatagctctattattttgagatacgtcccatcaatacctaatttattgagagtttttgcatgaagggctgctgaattttgtcaaaggccttttctgcacctattgagataatcatgtggtttttgtctttggctgtgtttatatgctggattacatttattaagttgtgtatattgtaccagccttgcatcccagggatgaagcccacttgatcatggtggataagctttttgatgtactgctggattcggtttgccagtattttattgaggatttttgcatcaatgttcatcaaggatattggtctaaaattctcttttttagttgtgtctctgccaggctttggtatcaggatgatgctggcctcatcaaatgagttagggaggattccctctttttctattgattggaatagtttcagaaggaatggtagcagttcctccttgtacctctggtagaattcggccatggatccatctggtcgtgtacttttttttgttggtaagctattaattattgcctaaatttcagagccttttattggtctattcagagattcaacttcttcctggtttagactttggagggtgtatgtgtcgagtaatttatccatttcttctagattttctagtttattttcattgaggtgtttatattattctctgatggtagtttgtatttctgtgggatcggtggtgatatcccctttatcattttttattgggtctattagattcttttctcttttcttcctttttagtcttgctagtggtctatcaattttgttgatcttttcaaaaaactagcacctggattcattgattttttgaaggggttttgtgtctctatctccttcagttctgctctgatcttagttatttcttgccttctgctagcttttgaatgtgtttggtcttgcttttctagttcttttaattgtgatattagggtgtcaattttgggtctttcgtgctttctcttgtgggcatttagtgctagaaatttccctctacacactgctttgaatgagtcccagagattctggtatgttgtgtctttgttctagctggtttcaaagaacatctttatttctggttttatatccttatgtatccaatagtcattcaggagcaggttgttcagtttccacgtatttgagtgtttttcagtgggtttcctaatcctgaggtctaatttgattgcactgtggtctgagagaccacttgttataatttctgttcttttgtatttgctgaggagtgctgtacttccaactacgttgtcaattttggaataggtgcagcatggtgctgagaagaatgtatattctgttgatttggggtggagatttctgtagatgtctattaggtccactgggtgcagagctgaatttacttcctggatatccttgttacctttctctttcattgatctgtctattgttgacagtggagtgttaaagtctcccattattattgtgtgggagtctaagtctctttttcagttcactaaggacttgctttatgaatctgggtgctcctgtattgggtgcatatatatttaggatagttagctcttcttgttgaattgatccctttatcattatgtaatggcctgctttgtctcttttgatctttgttgatttaaagtccgttttatcagagactagcattgcaagctatgcctttttttgttttccattttcttggtagatcttcctccatccctttattttgagcctatgtgtgtctctgcacgtgagatgggtttcctgaatacaacacaatgattggtcttgactctttatccaatttgccagtctgtgtcttttaattggaacatttagcccattttcatttaacgttaatattgttatgtgtgaatttgatcctgtcattatgatgttagctggttattttgctcagtagttgatgcagtttcttcctagcatcaatggtgtttacaatcagccatttttctgccatggctggtactgatttttcctttccatgtttagtgcttcgttcagcagctcttttagggcaggcctggttgtgacagaatctctcagcatttgcttgcctgtacaggattttatttctccttcacttatgaagcttagtttggctggatatgaaattctagtttgaaaattcttttctttaagaatgttgtttttctcaggtttgtcaaagatcagatagttgtagatatgtggctttatttctgaggactctgtcctgttccattgatctatatctctgttttcgtaccagtaccatgctgttttggttactgtaaccttgtagtatagtttcaagtcaggtagtgtgatgcctccagctttgttttttggcttagggttggcttggcggtgtgggctcttttttggttctatatgaactttaaagtagttttctccaattctgtgaagaaagtcattggtagcttgatgggaatggcattgaatctgtaaattaccttgggcagtatggccattttcacgatattaattcttcctacccatgagcatggaatattcttccaattgtttgtatcctcttttatttccttgagcagtggtttgtagttctccttgaagaggacattcacatcccttgtaagttggattcctaggtattttattctctttgaagcaactgtgaatgggagttcactcatgattaggctctctgtttgtttgtctgtcattggtgtatgagaatgtttgtgatctttgtacattgattttgtatcctgagactttgctgaagtttcttatcagcttatctttgacaaaactgagaaaaacaagcaatggggaaaggattccctatttaatacatggtgctgggaaaactggctagccatatgtagaaagctgaaactggatcccttccttacaccttatacaaaaatcaattcaagatggattaaggacttaaacgttagacctaaagccatcaaaaccctagaaggaaacctaggcaataccattcaggacataggcatgggcaaggacttcatgtctaaaacaccaaaagcaatggcaacaaaagacaaaattgacaaatgggatctaattaaactaaatagcttctgtgcagcaaaagaaactaccatcagagtgaacaggcaacctacaaaatgggagaaaattttcgcaacctactcatctgacaaagggctaatatccagaatatacaatgaactcaaaccaatttacaagaaaaaaaacaacaacgctatcaaaaagtgggcaaaggacatgaacagacacctctcaaaagaagacatttatgcagccaaaaaacacatgaaaaaatgctcaccatcactagccatcagagaaatgcaaatcaaaaccacaatgagataccctctcacaccagttagaatggctatcattcaaaagtcaggaaacaacaagtgctggagaggatgtggagaaatgggaacacttttacactgttggtgggactgtaaagtagttcaaccattgtggaagtcagtgtggcgattcctcagggatctagaactagtaataccatttgacccagtcatcccattactgggtatatacccaaaggactgtaaatcatgctgctttaaagtcacatgcacacatatgtttattgcggcattattcacaatagcaaagacttggaaccaacccaaatgtccaacaatgatagactggattaagaaaatgtggcacatatacaccatggaatactatgcagccataaaaaatgatgagttcatgtcctttgtagggacatggatgaaattggaaatcatcattctcagtaaactatggcaagaacagacaaccaaacaccacatattctcactcataggtgggaattgaacaatgagaacacatggatacaggaaggggaacatcacactctggtgactgttgtggggtggggggagggggaggatagcatttggagatatgcctaatgctagatgacgagttagtgtgtccagcacaccagcatggcacatgtatacatatgtaactaacctgcacattgtgcacatgtaccctaaaactttaagtataataataaataaataaaaagattaaaaaaaagagaatgttgaatattagcccccactctcttctgtcttgcagagattctgctgacagatcagcttttagtctgatgggcttccctttgtgggcaacccgacctttctctctggctgcccttaacattttttctttcatttcagctttggtgaatctgacaattatgtgtcttggagttgctcttctcgaggagtatctttgtggcactctctgtatttcccaaatgtgaatgttggcctgccttgctagattggggaagttctcctgggtgatatcctgcagagtgttttccaacttggttccattctccctgtcactttcagttacaccaattagacatagatttgttctttcacgtagccccatatttcttgg

SEQ ID NO: 893 - DNA, 1140 bp, Homo sapiens
aaacaaagtatttatgtctgttgtatagtatggatgcttgctcttggtggattcctaactatgattattttaacacttaagaaaggagggcataattccacaatgtgtttccattacagagataagcataacgcaaaaggagaagccatttttaacttcattcttgtggtaatgttctggctaattttcttactaataatcctttcatatattaagattgggaagaatctattgaggatttctaaaaggaggtcaaaatttcctaattctggtaaatatgccactacagctcgtaactcctttattgtacttatcatttttactatatgttttgttccctatcatgcctttcgattcatctacatttcttcacagctaaatgtatcatcttgctactggaaagaaattgttcacaaaaccaatgagatcatgctggttctctcatctttcaatagttgcttagatccagtcatgtatttcctgatgtccagtaacattcgcaaaataatgtgccaacttctttttagacgatttcaaggtgaaccaagtaggagtgaaagcacttcagaatttaaaccaggatactccctgcatgatacatctgtggcagtgaaaatacagtctagttctaaaagtacttgaggtaaacatactaaaatgaattatataatgcagcctcttaattctttgaagaactaaaaaattaggaaacaaagttctagcatttacaaaactcagatctcaaagctctgcttgtatttgtgatatttcatttgcttaactgtaaaccatttcaaggtactaacttttaaatctgtatgtaaaatcttttcaaaatacatttttaagctaatactcttaacatagattatgaagttaagtgaaatttatggctctaacagcaaaataattaaagtgccatagtttctcaagtgactaaagtagttattaaaatcaagcacttgatactaatttgaagtgtgtttaaaagtaaatgatttgggaactgacaatgtgtcagaaaatatatgttcatttatcattttaaaatcttgtataatttgccactgtattcatttatgcctaaatctctataacagatgaaaagataattaataaaatcctaattaaaaaatgaga

SEQ ID NO: 894 - DNA, 6312 bp, Homo sapiens
  SITE (6195): n equals a,t,g, or c
cagttaatgcaattttgaagcatgccctgaatagattcagtcattatcaagtcaaactaaaaacggtgaaaggttgcgactattaccaaataggtatgtatttcaacatagcaatgtgatattttcacaaacatacccaaactgcattttaaaagcttctgctcatctggagtcacagtggaatctgttgggtcctgccctctgggtccagtactcctacatgagccagttgaaaaaaaactgcaggagtaggtggtggtgcgggggtacaatgcactaatactaggtttttgaacttgtgaataggatttgccaagtaacaacatttaaaaaacactatctactattacaaaactattgtgaccacttcaatatagcacatgggtcacaagtaatgcccactgggaaattaatcccctatgtaaacacagtggtttgtttcttgtcttcacaagcaattcttaacatatcaaacaggtagtttaaaaaatatcagtaaatagccttatatagtgaatgacattgtaatgtactaaccaacttcaaaggagaaaaaaaaacagtcaccaagtttaaaacagaatgtaattgtgatttttaattaaaaaaaaaatttttttttgagacagactctcgctctgttgcccaggctagagtacagtggcatgaacacagctcactgcagcctctgtctcccgggttcaagcaattctccagcctcagcctccggagtagctgggactacaggtgcgtgccaccacgccctgctaatttttttttttttttttggtattttttagtagaggcagggtttcgctatgttggccaggctggtctcgaattcctggactccagtgatttgcctgcctcggcctcccaaagtgctgggattacaggcatgaaccactgctcccggccaattttttttttttttatgttctttttttttgagacaaggtcttactccgtcacccaggctggagtacagtggagtgatctaggatcactgcaacctctgcttcccaggctcaagcgatcctcccaccttagcctctcgagtagctgggactataggcgcacgtcaccatacccgctaatttttatactttttgtagagacagggtttcaccatcttgcccaggctggtctagaactcctgaactcaagtgatcctcccacttcagcctcccaaagtgctgggatcacaggcatgaaccatggcgctcagctgtcaatttgtgaatcaataattgtatgctagctgtctaatacatagttctaaatgatggccactattataacataaacaaatgcactggctttgctttatgctctttaaactgaagactaaagcaaaaccagaaatgcttactgacagatttgtccaactattacttattttatttgcagattagagctgaggcaaatggtttcaggatatgtgctttgtgctaacagctttctggagacatcttgattatggctatcgggtctagaagtttaaaaagatatgctctgtgggtagtggcaatcattctgatgaatgatttgtgattctgtaaactctggatttacttccttataataatggacatagcaaataagattaataccctttccaaagaagtaaagctagatggcataacctgttcttaaaattgttaaagtgtatgttaaaggaatcatgtcaaaatactgctgatagaactcaatattaataaagaaaatgctgaccctatgtgataaggagtgagatttggtgaaaagcatcatgggctctaaaagtcagatctgagtcctaacttgggcactgtcatttaagagttgtgtggcctgccgggtgcggtggctcacgcctgtaaccccagcactttaggaggcagaggcgggcggaaaatgaggtcaggagttcaagaccagcctggccaacatagtgaaactccgtctctactaaaaatacaaaaattagctggatgtggtcccagctacttgggaggctgaggcaggagaactgcttgaactcgggaggcggaggttgcagtgagctgagaccatgccattgcactccagcctgggtgacagagtgagactctgtctcaaaaaaaaaaaaaaaaaaaaaaaaagagttgtgtggccaagagtaaagatcataacctcttgaactttctttctttcttcctttttttattttagagacaggttcatgctatgttgccttggctggcaggctggtcttgaactcctggtctcaagtgattctccagcctcagtctcccaaagtgttggggttcccacgcgtgagccactgtacctggccaaccttttgatctttcattacctcttttgtgatacctacctcacagagtattgcaagaattatgtaaaggaagtaatataaatgtgtttaacacagtgtctggtacacagaaagtactaaataaatattagttaatggtttggccatctagcttaagagttcaattctgactgcacattaaaatcccctaaggagcttttaaaggaaaccagtgcctgaaacccattccagaccaattaaatcagaatatctggggaaggagccaagcactggtatctttaaaaaaccctcaagaggattctaatatgcagccaggattgagaaccactgataatcccttctacaaagaacccaattggtggtagtctcaaaaatctccagtggtaagatccttatattgcctcccaagagagatcatttcattagaaaaaaatgatttccttaaaaggaggcaacatctgtctctgcaatttctatcattggttcttgttttgctttgtgaagacacatataacaaagtgaaacccttttctctatggctttgtaaagcattctcatctccagggtaacgtgcctatttccttcaacttgcttctttgacatgatttgagttcttctctccatttggtccatggccttttctaagtgtgctgctgtggatcaaacactgcattccaggtgagaccctaccagcctgggacagaagcagcatagtagtaacaattttcatttcagacatcacgtatctaggaattcaactaaagatgggtttttcgttgccaccacactacgctagtgatagagcaattgcaattgtgtttgttaatgcagctaaagctcttcctgtacttgtacagctgcttttaatatccacatgtagaacttcatatacatttctactaaattccctctttgatttaataatatttattatgctaagcattaggtacagagagccgaacaaaattgacttggttcttaatcctaatggaacttaaattctaacatgagagaagaaaaaaaatccaaaataactactcacaggtgagtttttcacgtcatttcagctacttgagctctcaaaatcacattacttcttgtgcctcaattccctgaacctatgagagctccctacataaccacacaatataggtggttcctctacagacacccttttccttttcctggtaatgcaggttgcattatcagtttcatttttggtagcctgacattctttctagattgccctttccttttagaatcttagatcacaggttgggcatagtggctcacacctgtaattccagcactttgggaggccgaagtgggcagatcacctgaggtcaggagttcgagaccagcctggccaacgtggtgaaaccccatctctactaaaaatacaaaaattagccgggcatggtggcgggcgcctgtaatcccagctactcgggaggctgaggcaggagaatcgcttgaagccagggggcggaggttgcagtgagccgagatcacgccattgcactctagcctgggtgacaagagcaaaactctgtctcaaaaacaaaacaaaacaaacaaacaaacaaaaaccagaatcttagatcacaagaaacatgcctatacctttctataaactttctgaaatttgtcttcctgcagttgagacacatgacagactagactcagtccttccccgctcccttcctttctccctccactttcctgaattctggaaacaggctcttaccagggattacataacttcctcttcaccagccagttcctcttctgtggaatcaatgctccccaactttacaacattttaaatcttaatgttaccctctaccaaaatgctttgtttttaatcaaattatgtgtagagctttaagaaaggctatttttctctgtgtataagatcaaatcagggacttaatttatgtaattcaaatccactttgcatggtagcagtcagggtttgaatgtccactcctccaaaatgtttactaatagggtctctgtcttattcaccttcctttcccacacagtacttagccaagtgtgagatatttactaaaatgagattaatcaaaaggtgtttattaaagctaacttttattaagcagtcactatgtgccaggattaagttcttcttatgcatttttcattttcacaaatgagaaaactaaggcatagaaaagattaagttatttgcccttggtcacaagttagttgggtctgattttgagaaccttgctctgggcatctttatgttaaccctgctaagtggctgctgtagagaaatagggcagtcactctatgagaggaatgtgatgagacctccagaaatgctttctttacttgttatgaccagctctcagactaagctctttacagcagtcaatgggccaataataagtagctttgcaaatattctctgctgccacaaacaagtagaattcaaacactatctcttcgaaggttctagcaagtctcaaattattgaacccagggcacatttaagctttggtcaggttactttcaaaatcttggattgcacatgctgtttcccatctacgttattactctatgcttctaggttaggagtggctaactggcagctgccagctaacttggttttgtttggttacttttttctcctgtccagtgatacaagagtctgtgtaaccttgcaggtgctgtattctcttagtctattatgttaattgcatgccctaagacccctaccttggtcttaggctgaaaagaaatttaggatcctcttctttattcccacttatagaatgagaccaccacaagtcacacgccatgtagcaatacatgtcaaaatgaatgaatgccacatatgagggaaaaagtcaaggcaggaagtggttctgaagctgggcagggccagcagtgggcccagctctcttatggctgtacatacctttagagaaactgatgctcatctttgagaaatatgagctgtcatttctcttcaccaccatctgtattcccataagaacttccctaagagaagatgatctcataaattgagttattttaatataatacatgaaacagaacttcaatgtaggccatggccacaggaaaggttagagcatgaaactccatgagataccacactatgtgctgcttgtttaatgatacaataatgttactacatacagtaggataaaagtaaagtttctcgcaatgtctgaaaataaatcatttattatttacactgtcttttttttttttttttttttaaagagatggggtcttgttctgttgcccaggctggagtgcagtggctcaattatagctcactacagccttgaactcctgggttcaagcaatccttctgctgtagcctcccgagtagctaggaccataggcgtgtgctgggaagcccagcctattatttacacttttagttaaagtaactgttattaaaatagcaaatgactcaatgtttggcattccgttgtaggaaaaatctgaagacataagaactacacatgaggaatatgtcatttagcactttcactttttgatctccacagaagacaatgagaagtcataccataacaatgacgacaacttcagtcagcagctggccttactcctcccacagaatgcgctttataaccaatcatagcgaccaaccgccacaaaacttctcagcaacaccaaatgttactacctgtcccatggatgaaaaattgctatctactgtgttaaccacatcctactctgttattttcatcgtgggactggttgggaacataatcgccctctatgtatttctgggtattcaccgtaaaagaaattccattcaaatttatctacttaacgtagccattgcagacctnctactcatcttctgcctccctttccgaataatgtatcatattaaccaaaaacagtggacactaggtgtgattctgtgcaaggttgtgggaacactgttttatttgaacatttaattt

SEQ ID NO: 895 - DNA, 8911 bp, Homo sapiens
ggcgcggatcggacccaagcaggtcggcggcggcggcaggagagcggccgggcgtcagctcctcgacccccgtgtcgggctagtccagcgaggcggacgggcggcgtgggcccatggccaggcccggcatggagcggtggcgcgaccggctggcgctggtgacgggggcctcggggggcatcggcgcggccgtggcccgggccctggtccagcagggactgaaggtggtgggctgcgcccgcactgtgggcaacatcgaggtgaggccgggccgagggcggggacgtcgcgggcgggtcgtttccccggagtcgggttcacctgcccgccacgccggggccctttgctctagtcggggcggcctctcggatcccttaaggcaggcttctcccttccccttaagtctcatctttgaaggagccgtttgccctgacagcccctgctcgagttaccgaatctccgaccccggcatctccccacccgcccctcgggtctccccagggtattggcccgaggaaggggaagccggaggtcgggggtggtggtctcgcccctgtggccttctcgcccccggcggccaagtgcctctaatctccagaagtcacccaccacgcagggcaaggtggctggccaaccagatgggcaggagccaggactgaggttggggttggggtgggagctttactgaagagcctcagccccgccccctcacctcgggggtaactcatgcccagtggcatgaggaatgaatggaatattcattagtgggccctcctccactctcctggggcgaacagagtgggtgaaatcgggcggaaaccttgagaggataaagcaacctggaactccttactctgctcttgacgtggggttgggagccctcagagctcagagaaaaatcaagatggccattttggagcagggaggaatttctgtgctaggctctctctggatgtgccctgtaagctcattctcagtgtcgggctagtgcttagctgcagggctttatctccaccgtgctcaaagtcctcaggcagggaaagggtaaggaggccttgggtgggggcagagggagaaggtatacaggaaggaggactgtcccctcccctgctgctgaccaaaggtatgctttataacccagataatcccaaggtcacctggctccatcactgccccactctttcctccctttatcctattctgaggagctcaggacccagccccagccttggagcccagaggatcaggccagggattaaacaactggattctgtaattctgaagccactcttgccttctcacctactcccctaccgcaagctagccaggaagggggggcctgagccccaaggggatccccaggctgatcactcagtcccagggtgactccatgtctgagaggagaatgcccctgttgtgagggggtgacatgatgttgtagatcattactgaggggaggtagggagatcaggtggcacaggtggggcaacaggaaggcagtgacagggagaaatacattctgagctcatcccttctggttttcttgtggcaggaattttgagtctagaggaggaagcgggaagatgtacaccaggggaggggaaagctgcagtcttccttgcccacagtctgctttgattgattcagtcattgatgttaaagcagaatttgggttctagcttcctacagagaaaactcctgtttcctgaagtgatcaaatgtgggtaaaatctggtgaaggggggtttctgattctcagaggactataccttttgaactcacagaaagtcaaagcagaaaagaatgtcccaagacacccgatcctgtcctttattcctggctcagcttgggaggaggaaggggctccaggccagggcagctggccaagctggccttcctctagggcaccgcacgccccttccccctcgcccacgtctacacagtcaccatcacaaggctcaagtgcccagtcactggcttccaaagaaggccacagaacgtattttcttcttgcctctgaatgtcagcttccccctgggctgcctctcagtggctctgccttctcaggtctttcttggcatgctgagggcctggagatgcacagggggtgttcaatggcacctgccacctgaattgcctcatagtctcctgagaaacctcagaggggagggtggtgcaccagggctcagagagaaagaatctgtcctgactttctgacccctcctttaggtagggagagaagattggcagctgggcttggttgaaaggcatgtctgagaactctgagccagttggctgcagtttgcgaggggaggggaatagttcagagatgagggactggctgacacaatgcagaagaagctgggttaaccagcccagtgactctcgggactggtgtagaagcatgaagtggtggagaggcgcatattacctatgggcagaagaggtgttcctgttgaggaagaggcagaaaagagagagcactccattctctaggtccctggcccctgttccacccaggacttgagtttatttatttatttatttatttatttgagacacagtcttgctctgtcacccaggctggagtgcagtggcgtgatctcagctcctgcaacctccgcctcctgggttcaagtgattcttgtgcctcagcctcccaagtagccaccacacccagctaatttttgtattttcagtagagatagggttccaccaagttagccaaggctggtctcaaactcctgacctcaactggtccacccgccttggccttccaaagtgttgggattacaggcatgagccaccacgcccagccaggacttgagtttatagtgaggtttctccattgataacagccttttcccttcatcactcggggagcactgtcatcccttagactttgaccaaagaggacagacttaggggatgggcagtccaacatcttcgtggctgaaagtcagctgccaaaggagcatgttttatgagtgtgacgggggtcggggtctgaggctggctagggagccgtgggagtgagctgctcaccccagtcagacccctgttgggtttcataggagctggctgctgaatgtaagagtgcaggctaccccgggactttgatcccctacagatgtgacctatcaaatgaagaggacatcctctccatgttctcagctatccgttctcagcacagcggtgtagacatctgcatcaacaatgctggcttggcccggcctgacaccctgctctcaggcagcaccagtggttggaaggacatgttcaatgtaagagctccaagcctccatcttccaggtggagggtggggaggagagaggggagccaggggtttgtgaaccagagtgctgctggggacgggacatctaggaagagggagcttcgggttcccacctggggcatcttgactctctcttggcttcttgccctaccagagggatagagagtggatgaatggccatatcagctcttctcttctttgagcccctggaggtagttcttttttttttttttttttttttttttgagatagagtcttgctttgtcacccaggctggagtgcagtggcatgatctctgctcactgcaacttccgcttcccaggttcaaacgattctcctgcttgagcctcctgagtagctggaattacaggcacccatcatcaatgcccatctaatttttttgtatttttagtagagacagggtttcaccttgttggccaggctggtctcaaactcctgatctcaggtgatctgcccatgttggcctcccaacgtgctgggattacaggcatgagccaccacgcccgacctgaaggtagttcttaaagtctagagtgatttccttgtgttagaagaaagattgttaggggagagaactgctgcctgttgaatgtttcccacttgtcagtcctgtgcctgggtgcttgggaacgtgatgttatgggaagaaaaggaagagagagacaagtgatgatattcttacctagcctcactagtaactatgtgactttaggcaggttggttaccttccttgagcttcagtcttgtcacaattaattgggatgaacacacctctatcatcaatatctggggtcacagctccaatgtcccctggggccaggtaggtacataaaggagtgagggaggttaggaggggtctgtggtgtgtgaggaagcacacagccactgctcaaatcctgcatagttgctctatggtggtgtgggcccagtgtggcctgatttgatgaaattttttttttttttgaggcgaagtcttgctctgtagttaccaggctggagtgcagtggcgtgatcttggctcactgcaacctccgccttctgggttcaagctattctcctgcctcagcctcctgagtagctgggactacaggcgggcaccaccatgcccagctaattttttttgtatttagtagagatggggtttcatcatgttggccaggatggtctgtatcgcctaacctcgtgatccgcctgccttggtctcccagagtgctgggattacaggtgtgagccaccacgcccagctgatcttatgatttctttgagagaagtggggagtctgattttatgtgacacccccccactcccattcactaaaatgacagctccatgagggcaagtattttatctgttttattctctggtatggcttgatcccataagcactgaaaagatagttattgaataaatgaaactttccagtacatgttggaagggtttttaaaatgttttgaaactgtgcacaggccaaacccaactttcaggacatgggttttcaacttctggatggtatgatggggtgatagtagggtataaaagtatcctgagaagttgaaagcagtgtgtgaatggggtgttcttttctccccacaatcctttcccatctgctgacagtagacttagcacctcacagatgcttgggcctggaaatgaagccatgaaaatgaagccctcagccttcttggagatcagagccatggtcctcacccacagcacatgggtctctaaacctggacctcaactcgcccatctgtaaaatgagggacttacattaaattcctacagctcctttcagcttgaacattatctgagtctattaggatcatcctatgaggcatcttctctttccctgcccctgataccctagacctgggagatttactcacctggtcccaggggatctatttctcccactctacctgccaggggctgagttctctgcctcacaagcccacattgccaagaagatgagaaacacggctggaaacctccctgtcctggcacccatctcttcctactgccatgaacaccaagacaggttcacaccaaaggtgttctgttcctcatggcaggctctgccacctgattaagagaaacatctaatctcctgctggttccctctcttcttaagaggagaggcctgaggacctgctgaaagctttatctctgcttgtcctccgggtgaggctaatgagtggggccaacgggtggggcagtgtaggcgctttacagcagacacgccttcagacctctgttccctgaagggtggggatgtgggggtcacctctgccagagggagtaggagtggcaagttacctgaccctctagagtctccgtgcctagtcttgtagatggaacccacgttaaaggaaggcatagaaaggagggtcaggccttctcttctccactcatctcaagggaggggatggggaaggagcagagagtagctgaggaaggtagggagaggctaggctgtgtgccggaggagagagatttgtaagccattttggtaaggattttgagcagtttaggagggagcagggccagagactgtcacagagaagagaagagtagggtatttgggggaagaaatggaaatgattccctatggaattagagggtctgtgctactgttcatagaggagatggccaagacagagtctcctgggtcaggagtgggtttgaagggtttccattcttgtttgcaggaacttggggggtcagccaggtgaggagctacctctgttatcaactgggggttgcggctttagggagaggggcatctcgtgtagaagacaagatgctctgtgcctgtggctggtctccggggggacctggacactgttttggaatgccacactgcccccttcccccctagcattctgtggctccatcacttgctcagttgggccggagtggagacacctcattgccctccctggcctgcaggtgaacgtgctggccctcagcatctgcacacgggaagcctaccagtccatgaaggagcggaatgtggacgatgggcacatcattaacatcaataggtgagggcaggtggccaatgggtaccactcacccaccaggctgggtaatgtgctgcagctcacctgacctctttggacctcagtttccttggtgggaaaatacagatttaatacctgaatggcacaattatggtgagggaaagaataatgttgtcaagtaccagcccctggttggctggaatgggcagcttagccccttccctctacagctgaagcctggggcctctcctgggactaagtgcctcgattcctcaggcctggggatgaaccccacctcatggcacaaagagtactatgtacagtgtctgccactggggagccccagtctgaggggggacatggcctctacctgccttgagatgtcccaatagaaccgtatcagtgaacatacagattagatggagagaattctgacattctgcaccaccaggagagtgcattctgtcgtcagcttagggatgagttccaggaaaaggagggttttccaaagctgtttgaataaccaaaattagattagtgagctgtaggatggccagtagaggtcccctttagaagtcttcccgatgggcatctgggtggtggggctgaccgggtacggcaggagcaccactggtctccctggaacttcattctctcctctttccccttcctctccccacccagcatgtctggccaccgagtgttacccctgtctgtgacccacttctatagtgccaccaagtatgccgtcactgcgctgacagagggactgaggcaagagcttcgggaggcccagacccacatccgagccacggtgaggctgtggcctagccctggtgggcacagggtggcgcaggccctccccacccacacacaccgttcaggaagcccatgttcagaatgtgccgctcagagctcctgggagtggactgggcacagaactgggtgctgctgctccaggcatggccctatgcagcccttcatttcctcatttcactgatccaggagccaacgaccagacttagactttgagctgggagggggctgacctgagggaaagcaagggactgtgggaaaccaggtgcacagtggctggaaaccgggactctgggctcttctcttgaaggccgcatgatcgtgagcgagtcactgaacctccctaagcctcggccttctcacttgtgaaaaggagatgatgagcttttcagggacacttttttgtaaaacgtttacctgacatataggaaaggctctgtagatggtaggtatcattgtggtcactgccagtggcagcttcggagggaggaggccgctgccggatatcaggcagccatcactgtgaagctggggttctgtggcctccatcctctcccctcgacctccccaagacctggcaaagctcagcccctgagaaggccctctctgttggcccagtgcatctctccaggtgtggtggagacacaattcgccttcaaactccacgacaaggaccctgagaaggcagctgccacctatgagcaaatgaaggtggggcctccctctgagcctggtgaagccactgactccctaaatgaaggcagagggaagctcggccttcagactccactcttccagcctttgtggctcctcctggagggttggggtggatgtgtggatgccacagagaagctcagtggtgggagggaatttgagtccattctgtccttgtctcaacccattcccctggtgctctcagtgtctcaaacccgaggatgtggccgaggctgttatctacgtcctcagcacccccgcacacatccaggtgagtctggccctgactgtctactcactggaggaacccaaccagccccagaggaggggagcagggagccctgcagggccaggggagagtgtcacagctgcctcatgccttgtaccttccacagattggagacatccagatgaggcccacggagcaggtgacctagtgactgtgggagctcctccttccctccccacccttcatggcttgcctcctgcctctggattttaggtgttgatttctggatcacgggataccacttcctgtccacaccccgaccaggggctagaaaatttgtttgagatttttatatcatcttgtcaaattgcttcagttgtaaatgtgaaaaatgggctggggaaaggaggtggtgtccctaattgttttacttgttaacttgttcttgtgcccctgggcacttggcctttgtctgctctcagtgtcttccctttgacatgggaaaggagttgtggccaaaatccccatcttcttgcacctcaacgtctgtggctcagggctggggtggcagagggaggccttcaccttatatctgtgttgttatccagggctccagacttcctcctctgcctgccccactgcaccctctcccccttatctatctccttctcggctccccagcccagtcttggcttcttgtcccctcctggggtcatccctccactctgactctgactatggcagcagaacaccagggcctggcccagtggatttcatggtgatcattaaaaaagaaaaatcgcaaccaatctg

SEQ ID NO: 896 - DNA, 7373 bp, Homo sapiens
gacccacgtgggagcctgggagcgggtggtcgtagctcggtagtccagttgtgggtaatcggggctgtttgttcctgtccgagagagctcggcggagacggctgtcgagtacccttcacctcggtgttgggagcctgggagcgaactgcggcgcgggttaccgctcccggggacgcagcaaggggcatcgagtccctggcgggagctgcgccatggcattgctctcgaccgtccggggcgcgacctggggtcgcctcgtcacccgtcatttctcccatgcagcgcggcatggggagcggcctggtggggaggagctaagccgcttgctgctggatgacctggtgccgacctctcggctggagcttctgtttggcatgaccccgtgtctcctggctctgcaggccgcccgccgctctgtggcccggctcctgctccaggcgggtaaagctgggctgcaggggaagcgggccgagctgctccggatggccgaggcgcgggacattccagttctgcggcccagacggcagaaactggacacaatgtgccgctaccaggtccaccagggtgtctgcatggaggtgagcccgctgcggccccggccttggagagaggccggggaggcgagcccaggcgacgacccccagcagttgtggctcgtcctcgatgggatccaggatccccggaattttggggctgtgctgcgttccgcacacttcctcggagtggataaggtcatcaccagccggagaaacaggcacggacgtccctcattctctatgtgccccaacttggagacgcagccgagttcctaagcaccttggcccttgggtgatcccttagccagacttacctgtcccagaactctcatccccctagcccttgggagccctgggagggtagggagccgggcttgagatggcccagcctaatgcggggaacggggaaaccttgcagctgcccgctcactccagtagtcagcaagtccagcgcgggggctatggaggtgatggacgtgttctccactgatgacctcaccggatttttacaggtaatgaggggcaagaggggaaggaacagatgtgagcccagctcagcctcttcaaggggacgaagctagcccctggcgagggagagaaaggggcatgttggcaccgcttcctttggccttctaaatccctctggggatggaagggtcctggagtttttaaaacggcaaatggagcattagctgaattcttcctagcgttataccctttcctgcaccccttccccaggtatgcaccactttgcctcttctgtaagtcagcctcagtgtctatttgcctactaggtcgggcttcagtaaatgcattttgttcagctgtggggagctgcgtacaggagacctgagttcctcgaatagggcacagcttgaaaggatgtttgaacaagaagatctttatgccattagtatctagcaagagacaaaccttggaaacccctctcccatccgtttgtcttcagctgtgcttcccttgctggacacaaggaggcagtattgctctgcatatggaatcccctctgaccataccccccccaacccccaccccaactgcagggtgagaaatttccctcttaagaagggggagagctctgggacctgtctagaacaacgctgtccaataaaaatatggtgtgagaaacataggtagttttagcttttctagtagccacattgaaaagtaaagagatgacattttaaataaattgtgtccagtatatccaaaataatatcaatttaacatgtaatcattttaattattattaatattattaattttttgagagagtttcattcttattgcccaagctggagtgcagtggtgcaatattggctcactgcaacctctgcctcctgggttcaagtgattctcctgcttcagccttccaagtaactgggattataggcacacaccatgcccagctaattttttttttttgtatttagatggggtttcactatgttggtccggctgttcttgaactcgtgaccttaagcgatccactcgcctcggcctcccaaagtgctgggattataggcatgagccaccgcacctggcctttaaaaaatattattaatgaaatattttacattcctttaaaaaatgttttacatacaacacacctcgatttgaattagccacctttcaattgcttaatagccacatgtagctagtggctactatattgaacagcacatatctagaagcattttttggcttcacttttttgtagagagcccctttctccaagcctgataggagatgaggttcccactcatcacttccagcccctgaacaggtagcttctgaaaacacagaaacactgcagaacatccacttaagctccaggcatcacatctccctactgtcatcagcatctgacctggagagtgtcatccgcctgttgctgtggaagagctggaggtgccccaagcaggggcctgtgctggggccccatcccttcctgcgtactcagagacactgctgtagcaattttcctcctcttcctgcagcatccacttttctcttacactctcttcagcatgcaagcaaacattcccctctcacgctcttgatctcacaccagtcagctcttcctctcacactgaatcaaaggcttcatcaaggtcaccagtggcctccatgttgctgcattccagggtctgttctcaattcttttctgacttgacccatctgcagcagctggcacagttgaccactccttcctccttgaaacactatacctgctttccttctgcttcaccatgtcctctctgagagacatttttagtggttcttcctcaaccccctgacttccgagcattagcatttcccagattttagtcctcggatctcttttgttgttgttgttaagagatggggtcagctgggcacaatggctcacgcatgtaatcccagcactttgggaggctgaggcaggcagatcatgaggtcaggagatcaagaccatcctggctaacacggtgaaacaccatctctactaaaaatacaaaaaattagctgggtgtggtggttcgtgcctgtagtcccagctactcgggaggcggaggtaggagaatcgcttgaacccgggaggtggaggtggtagtgagccgagattgtgccactgcactccagcctgagtgacagagtgacgtgtcaaaaaaaaaaaagagatgaggtcttggccgggagcggttgttaagagatggggtcttggccaggcacggtggctcacgcctataatcctagaactttgggaggctgaggcaggtggatcacctgaggtcaggagttcgagaccaacctggccaaaatggtgaaaccctgtctctactaaaaatacaaaaattacctgggcatggtggcgggcacttgtaatcccagctgctcgggaggctgaggcagaagagttgcttgaatccaggaggcggaggttgcagtgagccgagatcacagcgttgcactccagcctgggcaataagagtgaaactctatctcaaaaaaaaaaaaaagagagagagagagagagagagatggggtcttgctgtgttgcccagcctggagtccagtggcacaatcacagctcagtatagcctccgaattcctgggctcaagccatcctcccacctcagcctcctgagtagttggagatacaggtgcacaccatctcacctaatttttttctttcttttttctttttctttttttttttgtagagatgaggtctcactttgttgcccaggctggtctcaaactcctggcttcaagaagtcctcctgccttagcctcccaaaatgctgggattacaggcgtgagccacctcacctggtcctggatctcttttctgtatatgttcatttcttgttggtctcatctagtctcatggctttaaatactatctgaattcaaattcccgcccaagtgtatactccagcctggaccttggttctgaattccagattcactcatctagttgcctactgcacagttgttgttattgttgttgttgttttgctgtcaggcgggcatttcaaacctaacatttctaaaactgagcgcttgttccttctggagcaactccatccctttggttgtttaggtcaaaaaccttggcatcatccttaactaaagttatttccgtattatcaccatttctgcctgtttccactgctaccactctggcccaagcaagtcaccatcatctgttgaccgttattgcagaaacttcccacctggcctcctttcttctgctcttggctctcagcacagcaggcagagtgattctgttgaagtcataccatgttacttctctgctcaaaacctttcaaagcctctgtaccgctcagattcaaaggcagagtccttccagtagccctggagaccatacctcatgtggctcttgttccttcttctgtcttgacgcctctcttcccactggccaccttactgttctcaaacatgccagggaggcacctgcctctgtgcttgctgatctctctgcctagaatgttcttgccccagatgtctgcacggtgctcctccttctccttcaggtctgcactcaaatgtcacctcagtgagtccatccccacctgcccttccacaaggctgggattttggtctgttttgttttgttcagtgccctgtcctcagtgcctagaacagagcccatgctaggtgcttaataactattgactaattgactggatcagcagataaatgaatgtatgggcaaggctgggctcttccttggccagggctctgatggataattttttttttttttttttgagatgggggtctcactctgtcacccaagcaggagtgcagtggcgcaatcttagctcgctgcaatgtctgcctcctggtctcaagagatcctcgtgtctcctgagtagctgggattacaggctgatttttgtatttttagtagagacagagtttcaccatgatgctcaggctagtctttttttttttttttgagacagagtggagtctcgctttgttgcccaggctggaggcagtggtgtgctctcagctcactgcaacctccgcctcccgggttcaagcgattctcctccctcagactcccaaatagctgggactacaggcatgtgccaccacacccagctaattttttgtgtgtttttagtagagacggagtttcaccatgttagccagggtggtctcaaactcctgacctcaggtgatccgcccgcctcggcctcccaaagtgctgggattacaggcgtgagctactgagcctggttttttttttttttttttttttaatttgagatggagtttcactcttgctgcccaggctggagtacaatggcgcaatctcggttgactgcagcctctgcctcccgagttcaagcgattctcctgcctcagcctcctgagtagctgggattacaggcatgcaccaccatgcccggctaattttgtatttttagtagagacggggtttctccatgttgttcagactggtctcgaactcccaacctcaggtgatccccctgccttggcctcccaaagtgctggggattacaggcgtgagccaccgtgcctgggccaggctagttttgaactcctgacctcaggtaatctgcctgcttcagcctcccaaagtgctggaattacaggcttgagccactgcatacagcctctgatgaagatttgatgaattagaataggagaggcaggcatggtggctgacgcttgtaatcctagcactctgggaggccaaggtgggaggatcgcttgaagccaggagttccagaccaaccagggcaacatggcaaaacctcatctcaaaaaaaaaaaatgcaaaaactagccgggtggggtggcgagtgcctgtagtcccagctacttgggaggctgaggtgggaggatcaccagaacccaggcggttgaggctgcggtgagctgtgatcgtgccactgcactccagcctgagcgagagtaagaccctatctcaaaattaaaataaaaaaagaattagaacatatcttcttccccctttcagaccaaagcccagcagggctggctcgtggccggcacggtgggctgcccaagcacagaggatccccagtcctccgagatccccatcatgagttgcttggagttcctctgggaacggcctactctccttgtgctgggtaggtggatgtccctgcgtttgtgcccagattacatttcccgagcaactgggtgtccagctgggcaaccctaaccctcagccccacgccctgcagggaatgagggctcaggtctatcccaggaggtgcaggcctcctgccagcttctcctcaccatcctgccccggcgccagctgcctcctggacttgagtccttgaacgtctctgtggctgcaggtgagtctactcccctttccctttcctctatccctctaatcacgcaggtgggatttgatgccctctaatcccatttgctggctgtttgtgtgcctcagttgctttatgtacaaaatggggaaattacatcccgttgatgagatgaggggctgcctgaatgtctaggtctctaaacatcatccttctcctccgtcctctcttcccttgtccttgtgtctgtgcaggaattcttcttcactccatttgcagccagaggaagggtttccccacagagggggagagaaggcagcttctccaagacccccaagaaccctcagccaggtctgaagggctcagcatggctcagcacccagggctgtcttcaggcccagagaaagagaggcaaaatgagggctgacgtggactgtccacagtgttcatgtgctggagtcagggacggccgcacctgcctccgccggctccagtgtgcggggagcctctgcctgagtgtgcaccaggcccatgtttattgaccacagtctgagggggggggaaggggactgcggtggacaccagaggaagctgtttcctgttgtgatgttggacctgtagtaggacatggtgatttgttaatttccatgggaagccatgatggcctagcatggagggaatctgttcccaggccctgcctggaagttgagggaaagtttagacatctgcagagaggcaggcagcccagcccaggggacccgttcctcttgaaccagtcattgcctgtggcaaatgtgtgtatgagaatgtggggggtggagggcggggccctgatgtggagtagacagtgcgcacctcaggcccacacacggccccgccctggggccttgagcgcaggcctcatctttctgtgccgcgggactctgcacctacctcacagggttgttgtgaggctcaaataaaacatcactcagca

SEQ ID NO: 897 - DNA, 13224 bp, Homo sapiens
taagactcatggacatagctttaattatctttgcctgacgcccaatacctgaaaattaagatgttcatgcaagataaagaggtaatttttctcctcctcccagtcatcacccgtagcatccggttaagaggctctccacctcgctcattttggtctaactggatttacacaaactcactgtgcacgtgcctggggcgggcaaacccggaaacgacgccgagtcccgcgggatccaggaggagccaactgcgccggaggaggggtttcggccgacacgtcgggattggcggctgcagccaggggtcctccgacgctgggcttccgtgagcggcgctctgccaggtggggccggagctgcggggagggagttggcgcctagcgcgcagctccatccccgcctctgcagtggactcggccgcagaatcggggtcccgggctcctggaacttgtcccgcccaggccgcggcgaggaggtcactccagccggtgggacccgggccggggggcgggtgactggaaccgggggaggcgggaaggaggaggggatcgggcccaagggacacgaggtgggtcgcgggaccccgatatctcgggacaggcgtcttgccgctccgggcccagccgcccccttcgacacatactcgatgcatagacaatgggggtgtcctttgtcgctcctggcgggaaccccggccccacccccaactccacgcctcccattacccccagatctctggaccggattcgtcccattctcgtcctcatggtggacaagaaactggtggtggttttcggaggcacaggtgagccaaaccccagactggggcccttgcagagccagggcgcctagccctgaagaccgcccgtcctggggtctgcagggaggggtaaggtcactgggacccccgacccaggttggggctgtggtcgcaggaacgaggcccaaattgctttccaatttttttttttttggacggagttttgctctgtcacccaggctgcagtgcgatggcacgatctcggctcattgcaacctttgcctcccgggttgaagcgattctcctgtctcagcctcccgagtagctgggattacaagggcatgccaccacgcccggctaatttttgtatttttagtagagacggggtttcatcatattggtcaggctggtctcaaactcctgacctcaggtgatgacccgcctcggcctcccaaagtgcaggtattacaggcatgaaccaccacgccagacctgctttccaaattaaaaaaaaatgagttacttaacttatttgaataggagtacttgaacatgataccaaaattaaatcttcttcctagcctcctcttccacctcatctattgctgttaccaagtttcttgaatatcctgccagagtagataacatgttatcattttttcaaatgatagcatattatttcattcctattttttcttatttatacatatttaatatctctaacagctttattgagatataattcacgtactatacaatctacctgtttaaagtgtgcaactcactggtttctagtgtattcatagaattgtacaaccatcaccacaatcaattttagaaaatttccatcactccaaaaagaaactctggcccaggtgcagtggctcaaccctgtaatcccagcactttagttggaccaaatgggcagatcgcttgagctgaggtgtttgagaccagcctgaacaacagggcaaaatctcgtctctacaaaaaaatacaaaaattagtggggcgtggtgtcatgcacctatagctacctaggaggttgaggtgggaggatcacctgagtccagcaggtcaaggctgcagtgacctgattgtgccactgcactccagcctgggcaacagagtgagacctgatctcaaaaaaaaaaaaaaaaaaaagaactccatgaacccgtgaacagttactccccattcttactcctcccagccaacccctagaaagctccaatctacttttggtttctatggatttgtctattcgggacatttcatatgaataaaatcataatatgtagccttttctctctggcttcttcagttagcatgttttcaaggtttgttcatgttgtagtgtgtgtccgggctttactctttttttttttttttttgagacagagtcccgctctgttgcccaggcagcagtgcagtggcgtgatctctgctcactgcaacttctgccactcgggttcaagcgattctcctgtctcaccctcctgagtagcagggactacaggcgtgagccaccatgcctggctaatttttgtatttttaatagagatggggttttgccatgtggccaggctggtctcaaactcctgacctcaggtgatctgcccacttcagcttcctaaagtgctgggattagaggcttgagccaccgcgcccggccaactttacttttttatttttaagacagagtttctctcttgttgcccaggctggagtgcaatggtgtgatctctgctcgctgcaacctctgcctcccgggttcaagcaattctcctgcctcagcctcccaagtagctgggattacaggtgtgcaccaccacacccagctaattttgtattttttagtagagacggggtttcaccatgttggtcaggctggtctcgaactcctgacagctttacttatttttatggctgagtaatattccaccgtatggatagactatattctgtttgtccattcgtcagtggatggatacttgatttatttccactttttggctattatgaataatgctgccatggaacattggtgtacacttttttctgagtcagggtcttgctctgttgcccaggctggagtgcagtggctcaatcatcactcactacagctttgacttccaagcctcaagcaatcctcctgactcattcgcctgagtagctgggacttcagatgagcgctaacaggcccagctgattttttaattttttgtagagactgggtctcaccctgctgcctaggctggtctcaaactcctggcctcaagcaaaacccatcccccttaccctcccaaagtgcttagattacagctatgagctactgtgcccggcctcagtccttatttttgatgcatttctgtgtaaattgcagatatgtgtacaccgcccttccatactaaagcatgcataacattagctagaattcagtatttgtttatagattatttttaattatgaggtaaaatatacatataataaagaatttttttttttttttttttttggagacagggccttactctgttacccaggctggcgtgcagtggtgtgatcacggctcactgcagcctcaacctcctgggttcaggctttcctccagcctcagcctccctggtagctgggactacaggcacatgccaccacgcccagctaatttttggtttttttttgtagagatatggtttcaccatgttgcccaggctggtctcaaactcctgagctcaagagatctgcgtgcctcagcctcccaaagtgtctggattacaggcatgagcccctgggcccagctgcaacgcgcaaaatcttaagggtacatctgaccgatgcgcatgcctgtgtgactcaagctccatcgagatctgaataagtttttgtattcctttctgttaactatttttctttgtctcgtttttgagcagatctgaatatggttgtgtatctgaatatggctttatattctacttcaggaagaattcaaatcccatcaagatctgaatatggttttttcttttgttttgagacagagtctcactgtgtcacccaggctggagtgcagtggcccaatctcggctcactgcaacctctgccaccctggttcaagcgattctcctgcctcagcctcccaagtagctgggattacaggctccaccatgcccagctaatttttttttttttttgagacggagtcttgctctgtcgtccaggctggagtgcagtggcgcgatctcggctcactgcaagctccacctcctgggttcatgccattctcctgcctcagtctcccgagtagctgggactacaggcgcccgccaccacgcccggctaagtttttgtatttttagtagagacagggtttcaccgtgttagccaggatggtctcgatctcctgacctcatgatccgcccgcctcggcctcccaaagtgctgggattacagttgtgagctactgcacccggcctcatttttttatttttagtagagacggggtttcaccatcttggctaggctggtcttgagctcctgacctcgtgatccacctgtctcagcctcccaaagtgctaggattacagccactgcacccagcctgaatatggttttgtattctactttttttactttattacatcacaaatatttttacctttatttttttgagaccaagtttcgctcttgttgcccaggctggagtgcaatggcgcgatctcggctcaccgcaacctctgcctcctgggttcaagcgattctcctgcctcagcctctcgagtagctgggattacaggcatgtgccaccacgcctagctaattttgtatttttagtagagacagtggtttctccatgttggtcgggctgttctcaaactcccaacttcaggtgatctacccccctcggcctctcaaagtgctaggattacaggtgtgagccactgcaccaggccctttttttttttttttttttttttttgagagggaatctcactttgtcacccaggctggagtgcagtggcgtgatctgggctcactgcaacctccgcctcctgtgttcaagcgattctcctgccttagcctcctgagtagctgtgactacaggcgggtgccaccacgcccggctaagtttgtatttttagcagagacagggtttcactgtgttagccaggatggtctcggtctccttacctggtgatccactcggcctggcctcccaaagtgctgtgattacaggcgtgagccaccatgcctggccttttttttttttttttaatacagattctcgctgtgtcacccaggctgtggtgcagtggcgcaatctcagctcactgcaacctccgcctcctgggttccagcaattctcgtgcctcagcctcctgagtagctgggagtacaggcatgtgccttcacacccagctaatttttgtattttttgatagaggcggggtttcaccaagccaagatcgtgccactgcacttcagcctgggtgatagagtgagactccatctcaaaaaaataaaataaagaaaataaaaatacctgaatgagaatcgtcgttgagaaggtttcctggatgctccttgctgtggtggagcactcccttcggggtttcgcccttcagtgggactttcaggtaggtctgacctgagaggtctttttgattctttgtaggtgcccagggtggctccgtggcccgcacactcctggaagatgggacattcaaggttcgagtggtgacccgaaaccctaggaagaaggcagcaaaggagctgaggctgcaaggtgcagaagtagtgcagggagaccaagatgaccaggtcatcatggagctggccctgaatggggcttacgccaccttcatcgtgaccaattactgggagagctgcagccaggagcaggaggtcaagcaggtgagggcaggcaggagctgcagggaggcccggccaggctaggagcagagcgcctgggaggagctccgactctgcagggaggttggagcactgcaggcctttccctcttcttcatgcctctgcctgctctaggctgtgaagcaggtggacgctgttgctttctcatccaattactttttttttgtttgtttgaggccgtctcagtctccgtgagcaaccacgcctggcctgttcgtttgttttttttttttttaatcaaaaatgttagaagttttttttaaaaagtaatttccacttttattttagattcaggggtacatgcacaggtttgttacattggtatattgagtgatgctgaggtctggggtgtgactggacctgtcacccaggtagtgggcacagtacccagtaggtaggttttcaacccttgcctccctccctcccgtggttcccagtgtctgttgttgccttcatgtccacgtgtacccatccaaacttgttattagccttgaccctttcttcaattatggtcttacctagaagcccattatatagagcagacaaagacaacttctctgattaacgcagatcttttttttttttttttttttgagactgagtcttgctctgtcgcccaggccggagtgcagtggggtgatctcggctcactgcaacctctgcctcccagattcaagcaattcttctgcctcagcctcccgagtagctgggattataggtgtgtaccagcacacccaactaatttttgtatttttagtagaggcggggtttcaccatgttggccaggctggtcttgaactcctgacctcaggtgatccgcccacctcggcctcccaaagtgctgggattacaggcgtaagccacatgcccggccctgagctgatcttatttctttctttattttttgaggccgagtttcgcttttgttgcccaggctggcatgcaatggcgcaatcttggctcaccgcaacctccgcctcctgggttcaagttattctcctgccccagcctcccgaatagctgagattacatgcatgcgtcaccatgccctggtaatttttttgtatttttagtacagacggggtttctccatgttggtcaagctggtctctaactcccggcctcaggcgatccgcctgcctcggcctcccaaagtgctgggactgcgggcatgagccactgcgcccagcccagcagatcttatttctaatcctgatgattccctgtgggcttcctggtactgtcacgaaaaaggaccacaatccacgtggcttaaaaccatagaaatcagctgggcacagtggctcatgcttgtaatccccacactttgggaggccgaggcgggcagatcacttgaagtcaggagtttgagaccatcctggccaacacagtgaaaccctgtctctactaaaaatacaaaaattagctgggcatggtggtgggcgcctgtaatcccagctactcaggaggctgaggcaggagaattgcttgaacccaagaggcggaggttgcagtgagccaagattgtgccactgcactccggcctgagcgacagagctagactctgtctcaaaaacaaaaacaaaaaccacagaaatcgattctctgatattctagaagctagaagttcaaaatcaaggtgtcagcaatgtcaccctctctccagagtcttggaggccaggcgtggtagtttatgcttgtaatcccagcactttgggaggctgaggtgggcagatcacttaaggtcaggagttcaagaccagcctggccaacacagcaaaaccctgtctctacaaaaaatacaaaaattagccaggcatggtggcgggcacctgtagtcccagcgactcaggagggtgaggcaggagaattgcttgaatccaggaagcggaggctgcagtgagcagagatcacgccactgcactcctgcctgggtgacagagtgagagtccatcttaaaaaacaaaacaaaacaaggggtttgagggaaatccttcttcactgtttctggcttctcatggctccaggtgttcctgggcttgtggccacaaagctccaatctccgcttccctcttcgcatggccttctccaggtgttgtctcttctcccgtctcttataagtaccctggttactggatttagcgcctatctagttagtgcaggatgttcccatctcaagatccttcacgtaattacatctgccaagaccctttttccgaataaggtcacattcacagttttcaggaatgaggatgcggcatatctttttggaggccaccgtccgaatctctgcgtcacctcatgcagtaggtagtgttgtcatctgcattttaccagcgaggtcaggatggtgccatcacttctctggggtcacactgctcgtacatggcagagcctgatttgaacctaggcagctgtggtgcctctgtatagcctcccagggctctccaaggaagatggctgagctccatgggcagggtgttctcacaccagcagagatgggacgtgtgcattctcctttagacctccatgcaggccgtccccctgcagccgacctgcccccccgtcctatgttgcacatggtgggccagagtcagtggctggtagaaggcttccggggctgtgtttacgggcgtggtgtcatgtgtgaacatcattccaggagagggggcctcctcaagggtaagtggggtctagatgttaacctcgcagatggtggccgctccgggattagaatgctggggctgtgaccagggacagacatccttcttctgagccttgtgatctctccttccctgccctccaggggaagctgctcgctgatctggccaggcgcctgggcctccactatgtggtctacagcggcctggagaacatcaagaagctgacggcagggagattggccgccgcgcactttgacggcaaaggggaggtggaggaatatttccgggacattggcgttcccatgaccagtgtgcggctgccctgctattttgagaacctcctctcccacttcttgccccagaaagccccagacggaaagagctacttgctgagtaagtgccctttctcgcacacggtgaggcagagctctcaccctgtaaagccgttggtgtaacagaccgcgggccgctgtcacgtggtgccaggttcaagccgtggctccctcacgttaggcccaggactgagcacatcctgtcagcttgcggggcctcagcttcctgttctgtgagatgggctctataccaatgtttgcaggggtggcaagatctgctgagatggtggtgacacgatattcgcttggtccattggaaggctttacagagaggacctagtgattgtcagttctccttcaaagatgaggagggccgggcgctgtggcttatgcctgtagtcccagcactttgggaggctgaggcggggagaccagcctggccaacatggtgaaaccccatctctactaaaaatacaaaaattagctgggcgtggtgccacccacctgtactggcagctactagggaggctgaggcaggggaatcgcttgaacccaggaggtggaggttgcagtgagctgagattgtgccactgcactctagcctaggcgacaagagcaacactccgtctcaaaacaaacaaaacaaaacaaaacaaaacaaaaaaaccaaagacgaggagaggatttggaaaatgaagttcagttgcagatttcacaaactaggaaagctctttcttctcagtgcccattggggctataaacaggttaggtgcactggccctggctgggaacaaggctcacccaacctgtgtcctgctggtcactcagtgatcagggcaggaggggttggtgcctctggctggccactccttaccctctggttgaatgccaggtcaccctcgcataagggcccagcccatgggagtcctgctcacctggcgggccaagtctggtggtaacagtagccctttggtaccaccatttattatagtttgcaaagctggccaggcgcagtggcttacgcctgtaatcccagcactttgggaagccgaggtgggcagaccaccagttcaggagtttgagaccagcctggccagcatggtgtgaaaccccatctctactaaaaatacaaaaattagccagcctggcgtggtggtgcacgcctgtaatcccagctactcgggaggctgaggcagaagaatcgcttgaacccaggaggcagaggttgcagtgagccgagatcgtggcactgcactccagcctgggtgacagagcaagaccccgtctcaaaaaaaaaaggccgggcacggtggcttacgcctgtaatcccagcactttgggaggccgaggagggcggatcacgaggttcaggagatcgagaccatcatggctaacttggtgaaacccctgtctctactaaaaatacaaaaacttagccgggtgtggcggcaggcgcctgtagtcccagctactcgggaggctgaggcaggagaatggtgtgaacccgggaggtggagcttgtggtgagccaagattgcgccactgcactccagcctgggcgacagagcgagactccatctcaaaaaaaaaaaaaaaaaaaaacctgcagtcagggatatctcctgctccggtctgtgcgctctgtgccctcgagctcccaggtgatctgaacaggaagctgcactggcccctgtctctaggtaaggaggataggacccaagcattccacaggccacacccagacagttgccagcctccccatctacaaaacctcagcctggaagtttgcgagtcattcattcattcaggatttatgaagcatttatcatggacgtgctgctctaggccagccgttggtgtctggttaatcaggattcctggtaagtgagttggtatttggagtatctactcagaggtggacgttccagcttccaggaatctaggatatgacagagtacttcaggctggtgcctccagattagcggagaccctgggctccagccacactctctgtagcagctttcagagtccttttcctttgtcccttctctgtcatcctagcgctgagagagctgggcaggcccaggttcttagccccattctaggaatgcagcaacccaggctcagagagcctcaacagcctgccctaggtggcagtacccggattccatcccgtttcctgactcaattccactgctgcctctgtgctaccacaaatagcaagacttgtcttagctatgcccgagtgctggagtgtgcagctgactgctgggaagaaccagcttggaccctttggagaggggctctgtccctgcccctgtctgccctcgggacatataccagctcacgtctctgccccacaggcttgcccacaggtgacgttcccatggatggcatgtccgtgtctgacctgggtcctgtggtgctcagccttttgaagatgccagaaaaatacgtcggccagaacatcgggctgagcacttgcaggcacacggccgaggagtacgctgccctgctcaccaagcacacccgcaaggtcgtgcacgatgccaaggtgggcctcccgccccaggtgactcaggcatccttgtcagggctttctagctcccgtagggagggtgtgtccagggctgcccacacctctgggcagtacatctaaattcattcgttcatcgtcaacgtttattttctgctgttccaggagctaactggccacagagtgaaatttctggcttagatgttttgaccaaatagagagaaaagcttccaggaggagagggccataggagccaaggcaaggaggggtgaaaatgcaggccctgccgggctcctctgtgggagggaatttgaagagaaaagagtctggaaagatagacccgacccctcccctgtgggaggggatttaaagggaaagaggctagaaagatagggccgacccctgcccccattggcctggctgggtgggcaggaggcctactggacagactcttgggtacctggtttctaatgtttgtcattaccattaggaaagtaagacatactcattaaagaatctgggaggctgggtgcagtagctcacgcctgtaatcccagcactttgggaggccgaggcaggtggatcacctgaggtcaggagtttgagaccagcctggccaacagggtgaaaccccatctctactaaaaataaacaaattagccgggtgtggtggcaggcgcctgtaatcccagctacttgggaggctgaggcaagagaatcgcttgaactcaggaggcagagtttgcagcgagccgagatgccactgcactccagactgggcgacagagcgagactccaactccaaaaaaaaaaaagaatctgggaaacactggagtccttaaaagacgaaagttgggtcaggcgcggtagctcacacctgtaatcctagcactttgggaggctgaggcgggcaattacaaggtcaggaaatcgagaccatcctgactaacacggtgaaaccccgtctctactaaaaatacaaaaaattagcccggcgtggtgggcctaactcctgggctcaagcgatcctcccacctccacctcccaaagtgctgggatgacaggtgtgagccactgtgtctggtcaagctttggtttttgagaaagaaagtgatgcaggcaggtctctgatttggaagggactgagatattttcgtctcatgatctgaaaataatagtctttttatttattcatttttgagacagggtctcactcttgttgcccaggctggagtacagtggggtgatctcagctcactgcaacctccacctcctggtttcaagcgattctcctgtctcagcctcctaagtagctgggattacacgcacctaccaccaggctggctaatttttgtatttttgaaagagacggggttttatcgtgttggccacgctggtctcgaactcctggcctcaagagatttgcctgcctcagcctcccaaagtgcagggattacgggcatgagccacagcatctggccaagaacaatctttaaactgatctacaatgtcaggcagctcaggagagcagcagtttctgaactttcggctcttagaagttttcaaatgaccttgtacggaggacctgggtcagggaccgagacaatagtggctctgggtgtagcaggtcgggagaccccagcccatccggcctccctgccccgccacctcccggggcactggaggacgccggccacgacaggctcctctgcttccagatgactcctgaggactacgaaaagcttggctttcccggtgcccgggacctggccaacatgttccgtttctatgccctgagacccgaccgtgacatcgagctgaccctgagactcaaccccaaggccctgacgctggaccagtggctggaacagcacaaaggggacttcaacctgctgtgacctgcccgcctcgcggccccttgtggggatcgggggcaccagaggggcagaggcaccaacatctgaataaagccattgttctcccagatggcttccaggagaagagga

SEQ ID NO: 898 - DNA, 2756 bp, Homo sapiens
atttttttttctttgagatgaagttttgctcttgtcgcccaggctggagtgcaatggcatgatcttggctcactgaaacctctgcctcccaggttcaagcaattctccttgctcagcctcccgagtagctgggattacaggctactttttgcaaggctaatttttgtatttttagtagagacggggtttcacaatgttagccaggctggtctcgaactcctgacctcaggtgatccacccgccttggtctcccaaagtgctgggattacaggcgtgagccaccgcacccagtctaggtcaagtttttcatctctttcctttccaaggagttaaagctgaatttcaaattttacagtgaaatacacaattctaattttctttctttcttttttttttttttgagatgcagttttgctcctgttgcccaggctggaatgcagtggcacaatcttggctcatcgcaacctctgcctcccaggttcaagtgattctcctgcctcggcctcccaagtagctcggattacaggcacacaccaccatgcccagctaatttttgtattattattatttttttcttagtagagatggggtttttccatgttggtcaggctggtctctatctcccgacctcaggtgatccgcccatctcggcctcccaaagtgctgggatcacaagcatgagccactgcaccgggcccacaattctaattttcaaatatatcttcctcctggaggagtgatattccagttttgggtgcaatcctgatgtagagcccaactgtcctgtgaagagagtcagctgttaaaaggaaaccaaaaaatcaaggtagctctagctgtccaattttacaagttttcaacagacttgatgaggggtgagctaaaggcggtcaatgctttattgtctgtaactcactggcactggcatttctagagttgctcacgttcccccttttggtgactcacagcacttcaacatgttgccacagccaaggaaaaaaggaaatcaagtcagacaatggaggaatcacaggatttccctcttcacatccccaggtagatgaggtcattcaatgagtgtgtttccaaggctccacaaattcccacaccctcaccagtgtttaaacctgaatgttttatctgataactttttctaatttcaccaagtaagcttatatatgtcttaactgtgaactcctgataagcacaaattttgtcttgtgataatttatttttttcttttttgagacagggtctcactctgtcacccaggctggagtgcagtgatgcgatctcagctcactgcaatctccacttcgtgggctcaagtgatcctccaacctcaaactccccagtagctgggattacagacacgcgccaccccgcccgtttaacttttttgtatttttagtagagacggggtttcaccatgttggccaggctgatctcgaactcctgacctcaggtgatccgcctgcctcggcctcccaaagtgctgggattacaggagtgagccactgcaccggccagcgtttctttcttcaatcacactccaccttgtctggtttgtagcgccatcaacaaaacacagtacgtaaggatggacagccacaggccacgacaaccggctcatcagaagcgatttttttttttttttttttttttttagatggagtcttgctctgtcgcccaggctggagtgcaatggcgtgatctcggctcactgcaacctctgcctcccgggttcaagcgattctcctgcctcagcctcctaagtagctggagctacaggctcacgttaccatgcccggctgatttttgtatttttagtagagacggggtttcactatgttggccaggctggtctcggactcctgacctcaagcaatccgcccgccctggcctcccaaagtgctggaattacaggcgtgagccaccgacccggcccagacgcgatttaaatggcatgacacaggcaggcctcgtgcaaagactgcaaggaggtcccggcagcttttgcagggcaattaatccacccagagcactgcgctcagaaagtaataggtaaacccgcgtccggactaaccggctgcccccacacttgatccctcccagtccgactctgctccagggcgtaccagggttcactcgtgaagtcacgacacccactcaaggggcacttcctatagagataagggcattagaggaagggcagagccccggtcaatgccaacagcccgggaaacagccaagccgggctccaatctctgccggcatcccctgtctgcaccgccgacgcccccagctacgaccccgggggtcacctcgcccagcatagccgtgacgctgggagagggtgggcccaacggggacgccaaagagagccattcaggcctccccgcgcccccggggagacgacttctggagagcggcgtccgcggtttcgccctcccctgacagcccctccacgcccttcttcgtccttctgcccggcctcacccagcttccggccgcccccggccgggtctcccctcagaccggcgcaggggacccaaagggctgtggcccggccaagcccaggtccgaaggcctggaccgaggcagggcccgcgaaggacgcagcgcggtccgagaagccgggcggaaggaaggccccgggagggcgcggacagctcacctgccgcaggtcgctgtcgcctgtccgccagcctccagtcagcgtgcccgtcagcgactccctcaggcgccgcagtccc

SEQ ID NO: 899 - DNA, 11950 bp, Homo sapiens
gctgctcagcacccaggacggagaggagcagagaagcagcagaagcagccaagagctggagccagaccaggaacctgagccagagctggggttgaagctggagcagcagcaaaagcaacagcagctacagaagttggaacgatgctggtcaccttgggactgctcacctccttcttctcgttcctgtatatggtagctccatccatcaggtttgtcttaattcagcaactcaaacaatcgtttacaaagacctgcactggaagccggttctcagctgctgaaagaagagaaagggaaggaggctgacagaggagaaagtcagggcaggaaaagcaggaaggaagggggtgttgtggataccatggtggaaaaccagaaggaagcatctgcggccgggcagaggtggggctgagttctggccccacctgagctctggggagagttctactgccagcggaaggctgcatggatgactctgtcaagtagctcaacaaacaccttaggtgggagtccttgcgttttcattttattcctttgggtgtctctgaagaactcggagactctgtccctattcagggtggccctgctggcttgtcatgctgttaagtaccaggtagtttgggaaagaaacaaactcttctgcctttgagactaccctcaattaatgttttgggatggcttttttgctgtgggatttctagaggtgtcaaataaaagtgtgttctgagtggagaatttttaaatttctcttttttaatttttgctctgtcaccccagggtggagtgcattggtgtagtcataggtcactgcagccttgaactcttgggctcaagcaaccctcctgcctcagcctcccaagtagttgggaatataggcaggtgccactacacccagctactttttaaattttttgtggagatgggggtctcactatgttgcccaggctggtctcaaactcctgggcttaagcgaccatcccacgttggcctcccaagatgttgggattacaggcatgagccactgggctcagcctaaaaaatttcttatgataaaggaggttaaatggacctaccaaggacagtgttattctaggttctccatagagatctgggttcaagtcccacttctgccaccactatgtgacatgaacctccctgagcctcagttttctctactgtaatgtggaaataatactggagaagttgagaggattaaaataaattacatatggaaagtgcctagactagtaattggcagtcagatgatgtgcaggaaatgttagttctgcccctccgtattctgttttaggacctgtgaagtcaacttcatgtaaaagagtgctctctgcacagaggtctgaacaaaggaggttttctctctgtttgccatcggccagaatgaaatctctaatacaatggctgaaagcctcggaaatgacccactccctaaaactggagaggcagcctaagatcagtacctgtgtatgccatcccccagagtgctaagagcagtacctgtgtgtgccaccccccacagagtgctgttcatcagttactcatgatgatggttactgaatattgactccgctaatgtttatcatgcatatgttttgaatgtaggttagaggggaaagctttcctctggaacctctagagataagagctagatgtatttattatctaacaaggaaagtctccattggccctgactccagcatttactctgtttgctaatatgattatttgtggcttctgggcaagtgatcttcccacctgcaccgataaacaggcgactaccttgccccatggaaaaatgttgtcctatgaaggttagcttttatgagtctcctgactgcaacttaaagatacccttctttgaggctggatagagtttttttttttttttttaacgtatcttagtgtgagctcgtgaaggatggtacgtgatgctcttgtttcccttgccgataggaagttctttgctggtggagtgtgtagaacaaatgtgcagcttcctggcaaggtagtggtgatcactggcgccaacacgggcattggcaaggagacggccagagagctcgctagccgaggtaagtgtttcccctttagtctccaaagggccatgcctcccacccttcttcccactggggcctctgtccatattgctttgtgtttcctcctaggcttgggggctctgactagaaattcaaggaacctgggattcaagtccaactgtgacaccaacttacactgtggcctccaataaactgcttctttcctattccctctctattaaataaaataaggaaaacgatgtctgtgtatagccaagtcagttattctaaaaggagatactaagtgacattaaatatcagaatgtaaaacctgggaaccaggttcccagcctgggattaaactgacagcaagaagactgaacagtactactgtgaaaagcccgaagtggcaatatgttcactctaccgttgaaggatggctgggagaatgaatgctctgtcccccagtcccaagctcacttactatacctcctttatagcctaggatatgaacatactgctctttttttgtcttggacccaggagcccgagtctatattgcctgcagagatgtactgaagggggagtctgctgccagtgaaatccgagtggatacaaagaactcccaggtgctggtgcggaaattggacctatccgacaccaaatctatccgagcctttgctgagggctttctggcaggtgaggtcctgatgggtaggtagaaaagcaggaaattgggtatgggagtggctgctccaccctagaccatctatggcccttacatcagaaccatcatccaccccactagacaggttctgccacatgaaccagcaggacagggaattggcaagaggatggtgggtagatagactgggcaggatccttatcatcttttcgcctcagcaatgggaatgtcggaggtgttagctccctgtctgggcttgcaccttggcatcaaggtgtggccacaatgccactctcttctttcatcctgagaatcaaccttgtgtggccataggcatgagatgaagttgtgctgctggcaagttcttctggatcttggaaaatgaccagcttctaccacggactatgaaatccatgagggacatcctgggaccatgtctggcttgtgttaccactggattcctagtgcccagcagagtgcacctggctcagagtcggtagttagtacacatttgctgaataaatgaatgaacaatgtccaggaagatatgagtaactaaaattactcattagaaacccagtgacaatgcttattggatgtcactgagataggtccaaatgaaggatagttattgagtgctgaggcaataccttgttttaaaaggaaggggcagagcaagtgactcctatcaaaatgttaccccaacaaagacaactaatgaacaaagggaaagggcaattatgcaggtctgttacaggcagctaggggactccttgctaaccataggatctctttggttgtgccctatagaggaaaagcagctccatattctgatcaacaatgcgggagtaatgatgtgtccatattccaagacagctgatggctttgaaacccacctgggagtcaaccacctgggtaagtatctttgggtgactaaaaaatgaggtacacccactatcttttctttaggaagatgacactgtgtaaatgtggagaatgtccaggggccttcatagagcctaggaattccaatagactagacccattggcttgttgttcactgtacctctcctgatcagtctaaaaaagtgagatcttcctacccataccattaagaagccccaaatttcaggaaataccagggagaagaatgtcattcttggatggggcagtggcagtacaaggcttgccaggcagggccagacctggggttatgcaggcatctgggcttggctggaggggtcacatctacatgatggccaaccaagccatgggttggtccacggaggtaggcaatccttgagaacttgagtacgaggcagggtggggttcagcgttcaaggcaaagactttagggaggagagcatggagcatgttttctgatcctaagcaaatgttatcttccctgactgttctatccttctgcctatacacaagtgtacctgggtccctagttatgcgatcatggccagagtgggagttggaagccagcaggtgggtcaagggcagaggtacaaagtaatataattaagtatgattgccttacttgtagtctagctctggctcttgctttgaggaatccacaaactcagaccaaactgaccattagagttactcatggcatcaaaattggttcacacccagaagatagtgagctaacactgaagtcctcttggctcccacatgctgagcctgggctgtcattccactttcaatcttccctgctggctctcctcacaggccacttcctcctcacctacctgctcctggagcggctaaaggtgtctgcccctgcacgggtggttaatgtgtcctcggtggctcaccacattggcaagattcccttccacgacctccagagcgagaagcgctacagcaggggttttgcctattgccacagcaagctggccaatgtgctttttactcgtgagctggccaagaggctccaaggtaagtctggagaaagaggaatagcaaaaatggtcctcagaccaaattagaggtccacagcaacttgggaagtcaggctgtcaaacatgcacgtgtcagtaatatctctgtggactaaggagaatgaaattatgaatggaataaaaacagagtgcttgcccccagggagcttaaaatcaaataggggttaagaacctcaaaaagttaccttgtatttgtgtcacatcttatctcttatctcatttgattttcacagtagctttttgcaacagacagaggctttttgttttttttgtttttttttttttgagacttgagtttcgctcttgtcgcccaggctggagtgcagtagtgcgatcttggctcactgcgacctctgcctcctgggttcaagtgattctcctgcatcagcctcttgagtagttgggattacaagcacgcaatatcacgcctggctaattttgtatttttagaagagacgagctttcaccatgttgtccaggttggtctcaaactcctgacctcaggtgatctggcagaagaggcctttggtaacaggtattattactcctagtttatagagcagagctgaggtccaaggaaatggccagctaaagagtatatggcaggtgagggcatcagaaccggaatgtgggtgctcagctttaaacctagggtgcttccttctgggtgccatttgctgaggtccacatggtgatctgagctacagagctgccactgcctggactcagggagttagggctggatttcagacccctgggtccaagttcttgctctaccacatgctagccgcatgtggatgtggatgtggatgtgcccctttaacctcccctgacttcatcttctcagctgtaaaatcaggtcaggctggttcttattccttaatgattctgtgctctcctggagcactgggtgagctgctggctctgacatctgcggatctaggggtccatttgttacagtgaataagccagagtttgggaacaatgatcttcacttccagaatgcctacagtagaagaagacggtaatcataaaaataaacaataactattacaataataattgagaggtttatgtgtgccatgtactacacatcttaactcatttaatacttgcaacattcctgtgaggtgggtgctattattttcccccactctaaatatgaaaagacaggcactgacagattaagaaatttgcccaaggaaggttcctagctgagccaggattcaaatgcagacagtccattccatgtttttaactttacatcagagttcagaccttggccctgcaccctgccaggtataaccttaggcaatttacttaaactttctgtgacttagttttctttgttgtaaatgggtatcataacataatattctattttacaagcctctttaagaattaaatgaaataatacatttaaagcatgttgtatggccctggcacataattggtactgaaaaatagtgaccgcaccagggatatcttgtggggggggggtgttaatcccccacaatctgcatcaccatccctcaatctatacctcatgaaatgtgcttgccaggcaaatgcagctcaaaataaagtcctacccaccaccttccaatcagatcgctacccctaaactcctcctttagaaatgataaagataccactgtcaatgattgatactactcactacatgttgtcatgtttattagtagtactaaagccacagtataaaaacgacattgaaatagaaggacctcgaaccaggcactccttttggaacatagaaggctgagaaggctatagatctttctgaaagatcaattcattcctgttcaaattccgcctggccaggagtggtacctgctgaatcctggggttatgtttcctgagtccctccttctcacttgtgtattttgctgcaggagataagctgttttcctgggctcagagtgtgtccctgatctaattgtgccctctttgtcccaggcaccggggtcaccacctacgcagtgcacccaggcgtcgtccgctctgagctggtccggcactcctccctgctctgcctgctctggcggctcttctccccctttgtcaagacggcacgggagggggcgcagaccagcctgcactgcgccctggctgagggcctggagcccctgagtggcaagtacttcaggtgtgtgaaggcaatgcggttctctccaccacctgtgtgcatgggaggtgccggactcgctgggctgttcatcctgagaagctgagtttgtgcctgatgatgcaatccaggtttgggttgggcctgcaaacagaatgccgttgctttgttaaggaaacttacagtacaaacttatgtgttgggaagagttgcttttctggctttattttatactcgtgtgccgcttttccatgaaaactttgcagctttctgaaagcttttaaagaagactgtcgctgttggttatgccatggagatctggatcgtttttctccttctttaagcttttggctcacttgattcatgaatttttaaataccaattagcacaaagtgctaggggaacgtcctctctcttcggtgtgaactctgtccctcaatgctgccaagattggcactatctgttgaaatatagaagtagaaattttagtgctgaatcttatcatgaactcaatgagcaactagagtctgggagtaaagggaagcccagggtgaaatctctttcccattccatgacagaatccagccctgtctgctctgttgtcccgctttgttcaaggcttttcatcagtgcagtatttattccgtgaagcactggaaatagtcttagtgtctgatgagaggggaatggataagtgataatagctaatgttgcttgagtttttataatgtgtttggtactcagttctgagtgtgtaatgtgtattaattcatataatcatcacaaccctgcgaggcaggtaatattaccccaagttttcacatgaaactgaggcgcaagataattaagaaacttgctcaaagtcatatagcttataagtggtagatctgggatttacgccctggcaatctggctctagagctgtgccattcagtatggtagccactagccacatgttgctattgagcacttgaaatatggctagtccagattgagatgcactgtaagtgtacagtgcataccagatttttgaagacatacaggttgagcatcacaaatctgaaaattcggagtccggaatatttcagtaagcatttcctttgagttgcatgttgctgctaaaaatgttttggatttcagagtatttcgggttttagatttttggggtttgagatgctcagctggtaagtacaatgcaaatatttcataattcaaataaatgtaaaatcctaaatacttctgatcccaagcatttttttttgagatggattttcactcttgtcactcaggctggagggcaatggcttgatcttggctcactgcaacttcagcctcctgggttcaagcgattctcctgactcagcctcctgagtagctgggattacaggtgcccgccaccacacctgactagtttttgtatttttagtcgagatgggctttcaccatgttggccaggctggtcttgaactcctgacgtcagttgatccacctgccttggcctcctaaagtgctgggattacaggcgtgagccaccgcgcccagccccaagcatttctgataagggatgctcaacctatagtataaaaaaagaagtgtaagttatctcattttatatttttaaatgagataaaagatatctcattttttatattgattgcatgctaaaatgattttgctatttgtgggttaaataaagtacatatttattaactcaataaatgaatgtgtaattaaatgttactaaataaatttcaccaatttctttttacattttaaatgtagctgctagaaaattcaaaatgacatatgtggctcacaattgtgtttctcatcatatttctttctttcttttttttttttttttttttttttggagacatagtctcactctgttgcccaggctggagtgcaatggcatgatcttggctcactgcaacctccacctcctgggttcaagggatcctcctgcctcagcctcccgagtagctgggattacaggtgcatgccacgacgcccagctagtttttgtatttctagtagagatggagttttgccatgttgaccaggctggtcttgaactcctgacctcaagtgatccgcccacctcagcctcccaaagtgctgggattgcaggcgtgagccactgcgcctggtcttcccatcatatttctattggacagttgctactctagagtctgagtgtttaacattgctgccttaaatatgtaataaaatatacagtcattaaatatcatattttaatataatatgtaattaatataaaaatgttagtgatataatgttgtaaggaaaaaactggaatacaaaactatatgattttttatacatagagaacagtctggagggataaccagccactgggcagtagtggttacttccagggagttttagggagagccaagcagagtgtgaaggatgatttttatctttttattctaggtgtttttttattatttaaaaattttgccaggtgcagtggctcatgcatgtaatcccagcactttgggaggctgaggtgggtggatcacttgaggtcaggagttgagaccagcctggccaacgtggtgtaaccccatctctactaaaaatacaaaaaattagctgatcatgttggtgggtgcctgtaatcccagccactcaggaggctgaggcaggagaatcacttgaacctgggaggcggaggctgcagtaagccgagatcactccactgcactccagcctgggcgacagaatgagactctgtctcaaaaaaaaaaaaaaaaaaaaaaatttaaggctgggtgtggcggctcatgcctgtagtcccagtactttgggaggccaaggcaggaggattgcttgagctcgggaattccataccagcctggacaacaaagtgagacccccatctctactaaaaatcaaaaaattagcccagcattgtggtgcatgcctgtagtcccagctactcgggaggctaaggtgggaggatggcttcagcctgggaggtcaaggctgcatgatagtgccactgcactccagcctgggtgatgaagtgagaccctatctcaaaaaaaaaaaaaaaatcctcctcaaactagatacagtatgatcccggttttatgtaagagagaaagagagagagagactatatctctatttatatccaaacaaagcaaaaaaaaaaaaaagactgtacagaaagcaactaaatgatagacttttcttttttttgagacggagtttcggtcttgtcgcccaggctggatttcagtggcgtgatctccactcactgcaacctctgcctcctgggttcaagccattctcctgcatcagcctcccaagtagctgggattacgggtgcccaccaccacacccggctaattgttttttgtatttttagtagaggcagggtttcgccttgttggccaggctgctcttgaactcctgacctcaggtgatccacccacctcagcctcccaaagtcctgggattacaggtgtgagccaccgtgcccagccgtgataggcttttcttcttttatcagcactgcatgttccgaatgttttacaggacttttataattagaaaaaaggaacattaaaaacaaaaaacatggggggagcggggagggatagcattaggagatatacctaatgctaaatgacgagttcatgggtgcagcacaccaacatggcacatgtatacatatgtaacaaacctgcacgttgtgcacatgtaccctaaaacttaaagtataataataataaaattaaaaaaaacaaaaaaaaacatgatgagaactgtgttctgctcccaccccctatccctctagtcctcagggcccctgctcattccaaagcaaatctggagggcttggtctggggttcatggtatgcaagtgcatctgtccccagaattcaagaggcctgtgaacttggatgggaaaataacttcatctttaatttaacctccaactgagatttggcattttcttcaattacgaatgtaggcactgaactgtagtagtagtagtgatacctgtgactttgtcaccaatagaattataaatatttttatatcacattgcagttgttgcagatatcctagaatgtcacttctgctcgccactactttgaaatcctttgattattagacctggtactagatcttgttatagaatatattaataaataagcctgtgtattactatatcacaaatttgtttttaaaatatttttggagtgcattttgtataattagtttctttgagtctggcatatattgtattttattcatttagaaacattctgagaaagggaccataaagatttccagactgctaattctcattcctggaatttactgtctttctctgccctccagtgactgcaagaggacctgggtgtctccaagggcccgaaataacaaaacagctgagcgcctatggaatgtcagctgtgagcttctaggaatccggtgggagtagctggtggaagagctgcagctttatcaggcccaatccatgccataatgaacagggaccaaggagaaggccaaccctaaaggattgtcctcttggccagctggtgctgcgaatcctgcctgctctgatcctcttgacccttctgggaatgtttgcacacctgacactcttgtgagactggcttatggcatgagttgtggacacctatagagtgttcttctctaagacctggaaagtcagcaaccctctgggggcagcaggactgggcagatcccaggctgggcatgggggtggcagaagagcccgagaaattgggtcagttccctcatcagcaccagaggctcagctgaggcaagaagagcaccatcactgcctatttctaggggctatacactccaactcttggttgatctctttctttttaaaaatatttgccaccaccctggagtctagaccaacacacaaagatcctggctaaccctggcctatttagattccttcctctcacctggaccttcccatttcaatcatgcagatggtttctttttgtaaagagttccgtttgcctttcaatttttagagaaaataaagactgcattcatctca

SEQ ID NO: 900 - DNA, 919 bp, Homo sapiens
gaattttacgcatgggcgcgaccgatcagctcagtaaagaggactggcagcagacttttgcggttaacgtcggcggtgcgtttaacctgttccagcaaaccatgaaccagtttcgccgtcagcggggcggggcgattgtcactgtggcgtccgacgccgcgcacacgccgcgtattggcatgagtgcttatggcgcatcgaaagcggcgctgaaaagcctggcgttgagcgtcgggctggaactggcgggtagcggcgtgcgctgtaatgtggtttcgcctggctccaccgacaccgatatgcaacgcacgctgtgggtgagcgatgacgccgaagaacagcgtattcgcggctttggcgagcagtttaaactcggcattccgctggggaaaatcgcccgtccacaagagatcgccaacacgattttgttcctcgcctctgacctcgccagccatattaccctacaggatattgtggtcgatggcggctcaacgctgggggcataagcatgatctggaaacgccatttaacgctcgacgaactgaacgccaccagcgataacacaatggtggcgcatctgggaattgtgtatacccgtctgggcgatgatgtgctggaagccgaaatgccggttgatacccgtactcatcagccgttcggtttactacatggcggcgcgtcggcggcgctggcggaaacgctgggatcgatggccggatttatgatgacccgcgacggacagtgtgtggtaggcacagaacttaatgcaacacaccatcgcccggtgtctgagggaaaggtacgcggcgtctgccagccgctgcatcttggtcggcaaaatcagagctgggaaatcgtcgttttcgatgaacaggggcggcgttgctgcacttgtcggctgggtacggcagttttggga

SEQ ID NO: 901 - DNA, 682 bp, Homo sapiens
gaattttacgcatgggcgcgaccgatcagctcagtaaagaggactggcagcagacttttgcggttaacgtcggcggtgcgtttaacctgttccagcaaaccatgaaccagtttcgccgtcagcggggcggggcgattgtcactgtggcgtccgacgccgcgcacacgccgcgtattggcatgagtgcttatggcgcatcgaaagcggcgctgaaaagcctggcgttgagcgtcgggctggaactggcgggtagcggcgtgcgctgtaatgtgggtttcgccctggctccaccgacaccgatatgcaacgcacgctgtgggtgagcgatgacgccgaagaacagcgtattcgcggctttggcgagcagtttaaactcggcattccgctggggaaaatcgcccgtccacaagagatcgccaacacgattttgttcctcgcctctgacctcgccagccatattaccctacaggatattgtggtcgatggcggctcaacgctgggggcataagcatgatctggaaacgccatttaacgctcgacgaactgaacgccaccagcgataacacaatggtggcgcatctgggaattgtgtatacccgtctgggcgatgatgtgctggaagccgaaatgccggttgatacccgtactcatcagccgttcggtttactacatggcggcgcgt

SEQ ID NO: 902 - DNA, 13220 bp, Homo sapiens
agatgtcatagacttaaaaaaaggagtggctcattttgaaaggattggaggagtaagttactgaaattgttaagtgcttaataaaatgaatcaagtcttttacatgaatcaccatttttcatagttactctctccatctttatttgcatggataatcactgactgtttttgaagctacatttgtttttgttttggtttattttgtttcgtgtcttccgtagaaatacttgttttctagatgtaattataataagggggataataaaagggtttagatacaagaaatgacaatgatactagtatatcttttaatttcagagttgttttatgtttcgtatttatccagctgtaacaataaagtaggacttgttatatgggcttacgtttttatccatttctccctttctgtctgcaggaatctgttggggatttgatgataaggaatattcagttacatcattcaggaaaatatctctgcacagtacaaacaaccctagaaagtttatctgcagtagccgatatcattgttagaggtaagcataaatggtgaaaaagtgatcacattgtttcttcacagttacagtgttcatatctaaattgtagacctctgagaaaccacaccatgttatggaagtgagatgtaatcagatagagttttattttttaaaccccaggactccatggtatgggtagtgtgaatacagacatggaactgtgtgaatacagacatggaactgtgtaggatttgactatcatgaacggtcacgcttggcaagcggtgtcagtaactaaaacttagacataccttctgtttataataaatcattcttgtcaatccagagtcaaatccacatgctcctgtagttcttcatattagctgcaattacttgagttagattttaagaggaattaaagatgatggttctcaatctttgagtataggttgatatgcaatcatcctatgcctgatattttctaatctccagaggaagcactactacattaatgtcatttaccatgtaaagggaattaatagaactttatcgctaataatgtgctataaatacattatggtcaatattttacttcctaagcacaacaggtaaaaataaaccatcctagtaccaaattaatgaatgtaagtatctccaatggagtcatgataaaacatttttttcaaggtccaccaggtcctcctgaggatgtgcaagtggaagacatttccagtactacttctcaactaagttggagagcaggcccagataataacagtcccattcaaatatttactattcagactcggacaccattttctgtgggttggcaggctgttgctacaggtgagtgacaaaagtgttttgggtcactttaaaaataatattttagtccaataattttaataaatgcaattacattttaaattaataattatataattttgtacaattatttgtttttgagtagtcccaacctaggtgccttagtgtctcattctttttagttccagaaattctcaatggtaagacatacaatgcaacagtggttggtttgagtccttgggtggaatatgaatttcgtgttgttgccggcaacagcattgggattggagaaccaagtgaaccatcagaattgttaagaactaaagcatcaggtaaagaatcaatgtgttctaaaagtgtggaagatttcgtatgatacagttcttaaaacaaaacaagtatttttatgtgtcttctaatacttttggctcaaaattgtttggcagtaaacgagtggctctcattttcttttatttttacatacacaaggcaaggtgtattttctccaaatagtaggttcaataagaaatgattacctttaagccaacatgtcaaaatcagagttcttaggaaactgtgtttgcatcgcatctattttctagtcaaaattcattagagaatctgtagatttgtatatgcaaatgagttactgcttgtttcattaaaatgttgtagccaggaattaactgagactctgttggtgcagtcagccatatattttcatctatttctcaactctgaactagttgtagcttcactgagcagtagtataaatttttttccatgcaaatgaggtaaatcctaagctcatttaacaggggcactaattgagcattaattggttcactgaacagcagaacgcaagaacctggatcagataccatgccttcttaagctcttttcaatggatcctctttgttccactcaaacttttacatccagggtgacatttaatctgctagctgtatatagcccacaaagttcacattcttattcgatcacataaacaaaggatcacttgtcatggctagcttaatttaacaaacacaaattaccttattaaagtgtgcacaattgtcagaagtcaataaatcaatccttaaactaaagataatgttatatgtttatcatagaattggggctagaaaaaggacatacttgacagtgatatcatccaattaaatcacgctagaagcttacagctgagaggaaatccctttgttttacagaagaggaaaatgaacaccaggatattagctggttgtttgtgacagagctaggttttgaatccaaacctcctgatttttacacccagcattctccataaaagaggatcttaatgtagatgagcaatagattagccaaagaaagtgtgtaaatatagaaattccccggccctcctatataccccctggatcagaatcttcaggtgttgtccatgactctggatatgagctttagtttcaggttgtttgtttacagttgatttatattttggtagctttggacagggttgacagaaactcttacattttcatagcaaagtttgtgtgccaccttctaaccattaatactctcttgtttcagtagcagaatgagactggtgatattcatacccactgagtcaaactctactaactgaaaacctactgagtctctcgtctctccctctctgtctctgacatcatcaaagactaacaacttgttctcaatatggttttaggcttaagtacaattaatttaaaattgaatagggaaaggaattttctatttctcagaacattggaaactttgtagaaagtaaatcaaaatataattcaaaatacttttccttacacagctaaactatgcaaagatcctgagatagtgtgcagttagtcactctaagctgtcaagcactataaattcagcaactctgtaaaatccactctgattcacatcgcttttgatcaaaggcattggaagtcttagaaaataaggtttaggttcacataacttctttctaaaaaattatgaagcttaaagctgacaaagttaagggtaaatttaaatacgaaaaggtatatctgaaaggtgcaattttgaaaaagaacaatcagattatcatatgactattttctggtcatgtttatagagctaaacatcagtatgaaatggaaataaataaaataagcaatctagatttatttaggtggtctatatggtggggaaaaatttgaaatgaggaattaaaacttacatattttaatccctgcctaccaatccccagacatatccaagtgcctcctcaaccaaccacctctcctattgttcagacatggtccagtatagacaatttcatgtaattccacatttaaaaagtataccctgctgatttagcgattatcacagatttaggatacttttgtcattacgtcaagaaaaataatgctttgaaacacttacgcatgtgtaaagtaaaacctcatgctcgtgaggcactacaataccatatacacactcagcatttcctcagcctgacagttactatgatctatgattcatcgtgtaagtccttacaaggatacagagttgaagggcatcgtcttataactcatcaaaattactggtttctgaatcctctaccacagagccttagatcccaagaaataaatagaaagaacctctcccagtcgcattcttgacaggagaaaaacctgactttgcaagtgaaaagttagaagaaaatccctcttcttctctcccgagagatttgagattgtaacgaggagttttaaaacaagaatatttatttacatatttttcagtatttaattttaactggtaaaatatcctgatgactaataaaaggaaaaattagtttagtttgtttattgaaaaaaaataattaatatactgcctcagtaacttgtttacagctcaactgtataattaggcactaaatcagcagtgtcactgtcaccatctgaatggaacatcattttgccaattagtagatgatgcataatgatgtcaaatacccgatgttactcaatttttaattaattttggagccagggtgctcatgtatcaaacacaactgtgtcctctctcttagaaatttggatatgtgtaaacataatttacgttcattaaaaatgcaagactctctcacagtatgcctgtgtgagattttgaaaagtgaaattcaaaaacaaaattcttcctgatgaagacgtactttaataattgccatcccacatttctcttggttatttttagtccctgttgtggcaccagtaaacatccatggaggtggaggaagtcggtctgaactcgtcattacgtgggaggtaattttctgtccaactgagttattttgaagaaaagagatttaactggccagaaagaaactgaaaaacaaaaagatttatttgatcactattgagagcgtaaaaaaatatggtataaaaatacatcatcctgatgatgaattatttagaggaggtattaggaacttttctcatggtgagacagtatgacgaactcagcacaattttctcccaaatacacgaaaaacaacttcagtatctattgagcgtgtgtcagtagcattttcgttatcgcttgatgaattaggcattgtttgatttgttacctgtggcactgttgtattgtgaataagttgagcccagtagactgtaggcaaaaaatagttcttgtcctaaccctgctgttcacctctgatcaactcattcttccctgcatctagatgaaagcttaggcacatggagtagattttgtggtcattcttattacccattaacatacaggctcatttttttaccttattaaaaatttcagtctggtgtgtacacttcaaactggagtataaacgttagaatttagactttcaaccaatttaaagtttctcattttcagtatctcagtgcctcagcctaagaattctatagcgtgaaagggaatacgtggtcagttcaacttctctccattctgctctttaatttatctttccccattcacagtgttacctctggattctccagagctgtagaaggttggtgttggtaggggaggagaaaggaaaaggtctggattgctggtacatttctcgtttgactttggtgtgctctagttatggcaaattatcagacgctgccatttcatagggtagggtttctgcgttttttaatttattttttatctgggagatggccactggatgatcccccaccaaggactcccaactgcaattccttggtgcagacccaactggctgctgaagggtatcagttcctggattttggtggtccatttccagactcttccagtgaatattctctctcttgtaggtggtctttgtggatagagtccccttgaaggctgtccatggatgacccacttgcatgggtttcacatttgtcctcagcagacacataccctgctccatgtttagcggaagtgcaatgcatacccacttagcatctctcttcactctgccaccgtgggctgtctggatctcttccccactttaaatttctcagacatttgtcagttaaatgaacctgcgtcccttatgttccaggaaatgcaaaccaggtgtttcttgctgtagcctacttcacatagctaggctatgagagataactgggaaccagagacgttattctttatggttataaatgacagtgtcagaaactagatgcaattgccctgaaagtcaccctttcctctggatatcttgtttcatgtggacattataggcctagcacagtgcttggaaagtggtccaccctccatgaacacttgttgaatggaaggtagtgttttcagagagttggaactctcagaggccagacagagggggaaaccctattttttcaagcatttacaggatttcaggtgccacacagagcatttcatatcattcagtccccacaataatgctataaggtggttataccactttcaagtaagaaaactgagacttagaaaagtgacatcattgggcagagaagcatttgaacacagggttctctctttctgttcttttactgtatcctgtattacaatcccaattgtcttcatgcactgtgatggctgagggtgggcctgagtccttgagtatatctaccttaagtagtaagttaaccatattatacctactactccaaacatatttcccataaaacactgactttcaaatgagtctacaagagaattgtttgtgagtagtttatttaggtttctatattcatcaaaggccaaataagcattatcatcatagtgtacaggaagttttgcctgacttaataacttattttgttctcctccttggtaagaaattcctacaggctgttgttgcaattgcttgtacacagtctataatgagggcccaaatgctatgcattcattcttaaatagagatgagcatgaattaccaaagaatactgtctttccacgatttataatgttcttttttctttaaggcaaaggtacacaaaccatgacctatgagacaaatttgtctagtttcctgttttgataaataaatccacccatagctacatccattaatgtattgatgctttcttgctgttgcatgagaccatatatcccacaatgcttaaaatatttactatctggtagcaacaatagacgctagcgtctgctagagtgacgagaggaagggcgagggttgaaaaactagctatattaatgggtactgtgctcactacctgggtgacgggatccatcataccccaaacctcagcatcacacagtatatccatgcaacaaacttgcacatgtacccccgaatctaaaataaaagttgaattttttttttaagtttactctctggccctctacagaaaaagcatactaacccctatttttaaaaattaaactaaattaaagccacttcctctgtgtttattttttcttcctgaggaggaggtggggggtggatatctgatatgcagatacttgcagaaagtaaattagtgaaatcggtttcccatttatcactcatatttgacattatgtacaagcagatactgagccaacttcttctggtgcccagcttctttatggaataagttatgtatatttaggagaagattcatacattaggatgaatctgagccaccagaatgcaggtagtaattccttcaatttaatgaactctattaggtagcttctctgttcctatcagtggaatacaaaaatggatgagaaaaggtctgaatgctcagaagcgtagaggacagaatggtcttaacccagcctggaaggaggtcaggaaagacaccatcagaactgagtatatctgaactacgttttgaaaagtgacttggaagtagagaggccaccccaggtcaatgtcactcctgttgtagttgaaatagtacctgttggactttgaaaggcactgcgcgacacaagactgttctaagttcagtcacaatctgccattacgtttcataagtgacaactttaatgattatccttcatttaggctccctgtggtataatctgcctgaactgaactaaatatctttcccgtgttttccccagagccacacaataaatgtagattttttgtttatttgttttgatttggtttgtttccaaaaacctagacataatatcaaatttttagaatatagcaatgggtaattcctttttaagggcatgtttatacattattttatcataatgtgtatactcccaaatacttccaggtttgaggtgcttgtggtgaatgtctcataaatattactataaaattaggtacacaggataaagcactatagagtaagagatacatacctacactgagggttggcacgctttttatttaaagggccagacagtaaaaatattcagtctcgtgggccacatgacctcttttctaatgtctcagtctgcttttgtagctcaaaagagccacataccacttacaaacatataggtgtgggtgtgtctcaaaacctttattttcaaaaccaggctgcatgccagatgtggctagaagtacatagttttgctgattcttagtctgtactaaagatttggttcttacagacactgtggttgagaattacattattagtttatcaattttcatagattttactcccaggagaatttcacaatttctttattttactgaacactgtctccacttaaagaaaactctttttctggccttgttaaataactatatatattttttaatcatttgactctctgttgatgtaagaataaagggaagtatctaaataagtctcttttttcccctctaatctgcatatgttggactcaggtctttcttgagagagcaccatgagaaacactaattgtacttgactaacaaaaacaaaactcccctatttatgtagatgaactgactaagcatcgtgattaaatccgagatgaaagaaacttcagaaatgaatcaaatgctctagcaagtagcatcgattcttataaatctcttccatgccattcaaaattaactggtttacttctagtctccctatgaaaaagaagagaagtgttaatatgaggaaatactttgttgtttccccagatgtccggagcagcacttttcttcctcttttcactttctgtatttgttagactgttccacatggcaagaaatagagaccagctcaggtcatctcgggtaatgggggtttattttaaagctacatgggaagtaatgaggacaggaaaaaagtctcagcaagcaggcaggaaggtcagatgaagaaccggaacatggttcatcactgctctgggcactcgggcacaggagctctaggcaaccatcaacaacccctctgctgatccagccccggcttgaatagtctctcatgcttatgcctcagttcctcccatttcctttacttccagttttctacctggctgccagctaatttggatgccctctctctaatttacagcatctgttttctcttagcttctattgcctcactgttcctgctactccatgttctctactttttgcctgctctgtgtatatctatcattgttttgccacccaccatgtttcatatgcaaactctgtgagaggaattgaccaggtctgttagtcaccgtagagtacagagattctgccctcatagatactcaccaagacggtgcctgtggttctggcgctcgtgaattggtgctcgcatgggttccaagtggcaagatagatagtgtgattgatagaataaatggactcccatgaataaagagaacctctgaaatggagttgtggacatgagggactagaagcactgtgtcctgtcaggtgttgcctttattagtctgtcagaatatttattaaaaaaaaaaaagcaaagcattttccttgggaaaaaccaaataaattccattgatttttcaatacaagtttcttgccatcaggagatatgttggtctaaattcaagtacagattcattttaatttgctaagtttatgtgattgtttacaatttttagtatctgcagagtacagggggaatattaccaatttctattttgctattttagtaattttagatttgaaatgtattttatagaatctgatctttgtgagagttaacagtttattctttcatgtgaggaaaaatgcacacatgtcactaccaatgaagatgtatgcctaaaaaaatgatgggaggtcttttatacttttttaaagaaatattctgtgtcttaaagcatatgttatttcacagtaattccattacacatgtcttacaaaaacttgtttaaaatgttgtgaaaggaaaacatatctagtcttgaaataaatagttaagaagttaatttgtgctgagtttaaaaattcatatcaaaccacatttgagtgtgtatcataaaatcttttaaactgttttattattataatttatgaatgatcaaagaaaaatatataaatatgtaaagcttgttttatatttctatctgaaaacttaaactatttatctgagtatctttaactgggatcatttttctaattggcattccaaataaaagtgttttttaatacatcattaaacagaataaatatccatatttgtctctatggaagaaatgtgaaataatcaataaacattatagtagcttaataaaatatttttgcaaatactcagtgattgatcacattctgcccaagtcaattccagaagaactgcagaatggggagggatttggatatatcatcatgttccggccagtgggctcgacaacctggtccaaggagaaagtgtcatctgtggaatcatcaaggtttgtctacagaaatgaaagcatcatcccactgtctccctttgaagtcaaagtgggtgtgtataataatgaaggagaaggatccctgagtactgtgaccattgtctactctggggaagatggtaagttgtcctcaactctggttttctttgagactctatgcatagtttgtgttcccttgttccattttcaatgaaccactctgctaaagatggttatgtctttctctggatggtagaacctcaactggccccaaggggaacttctctccagagtttttctgcttctgaaatggaggtttcatggaatgctattgcctggaatagaaacactggaagagtgctgggctatgaggtaatccacattaatttcacttttgcttatgaatgtgccaatggacttcgcaatagctcctattcaacagtcctatcctactagcctgttgttagcatatgataatgtgtgtctaaagctaaagcagagaatgaagttgagacagggtaggtgagcccccacattgagaggcttagcctgggatgtttcttgtcctcgctcaagacagaattcgagagtgagccagtggtaaaaaaacaaaaacaaaaacaaaaacaaaaaaaaacagctttattgaggcagcagtgttacagttttgaaattgcttctgcagagcagggctaccccataggcagtgtgctaagagcagcagcttggaagcagttctacactcatatttatacccacttctaattacatgcaaattaatgggtgagttagttattcagaaatttctagaaaaagggtggtaacctccaggccattgccatagaaagggatggtaacttccaggtgttgccatggcagtggtaaactgatacggaactggtggttgtgtcttatggagaggtgctttagcctcttccctgtttcagtcagtcttcaatctggtccacagtaaagtcctgcctcctccctcaaagtaagggaaatctttctaggtaattcaaagcaaacaaattaacacatagtagccatttttaaaggcatacagattcagtaagtaagatgagtaagctctaaagatctgctgtacaactgtgcacacagagtcaacaattatgcattgtacccttaaaatttttcaagaggacagatctcatattaagtgttcttaccacaacatcatttttcaaaagtgatcaggtgattatatgattaattattcaaattgcagtcatttttttttcccttggtaagaggtgaagtctgctcctcaatcatcttacaccatggaagaatttcattgagaaacctgctttgtgaattgcagtataacttggaaagatgtaatcatctcagaaaaggcagttaagtaatgaaaaaaaatacctagattgtcttgaatctgctatttttagtctatgaagaataaggcaaattacatttgtaggccttcatctcacaaagtaaagagacaagaacattttaagggaaagttgttcatcactcaatctttttcaacttgcaaattcagtgattcacaaaatgggtaacataatttatttaactttggatttagaataaatgtataatcctaaacattcttaattttgcctatatatatatatatatatatacacacacacacacgtatacatatacatactatatatacacacatatatatacatatatacacatatatatacatatatatacacatatatatatatatatatatatatacacacacacacacacatatatatatatatatataaccataatcctctgattccaacagaaagttctactctcaggacaggtgtcttttccactccatgccaagaatgccttacctcttatctgaaccctagttacttctcaaatttcatccctagtcgcctcttctctctgagctctactcccatcaattcctgatgtattttgtcaaattcttgtagcatattttttctataccacttctttgcaatgcattctgtgacttattttcacatacactgtggattctaacctcttagctagatgataaggggcttgaaaataggtacttaatttattctctttttttttcaatgtacctaaaacaatgctaatgcaaaggtagggttcagtataaattgaattattaattaacctgtgattcaaataactctgaaaagaaatgccaatagcaagacattataatgaaagtctttgactgattatatacaaatgtgtttttgtctgacttgttatacatcatttgctaaagctggtaacctttagatagctcataaaatactttattttggtaatctaaaaaatcacgttctctaatttccattgtgaatttgcattcatgacttttttcctcataaatattagagaataacaattttgttgttgtataaccattttaattagaaaacgtttttgtcatctatacttctgtcttcttcccatattccttgtggttgtggttgatagttgttggtaaaaaatgattgatagttattggggaacaataaattgcttgttttggtttttaattatcaggtcttatactggacagatgactccaaagaatcc

SEQ ID NO: 903 - DNA, 10957 bp, Homo sapiens
agatgtcatagacttaaaaaaaggagtggctcattttgaaaggattggaggagtaagttactgaaattgttaagtgcttaataaaatgaatcaagtcttttacatgaatcaccatttttcatagttactctctccatctttatttgcatggataatcactgactgtttttgaagctacatttgtttttgttttggtttattttgtttcgtgtcttccgtagaaatacttgttttctagatgtaattataataagggggataataaaagggtttagatacaagaaatgacaatgatactagtatatcttttaatttcagagttgttttatgtttcgtatttatccagctgtaacaataaagtaggacttgttatatgggcttacgtttttatccatttctccctttctgtctgcaggaatctgttggggatttgatgataaggaatattcagttacatcattcaggaaaatatctctgcacagtacaaacaaccctagaaagtttatctgcagtagccgatatcattgttagaggtaagcataaatggtgaaaaagtgatcacattgtttcttcacagttacagtgttcatatctaaattgtagacctctgagaaaccacaccatgttatggaagtgagatgtaatcagatagagttttattttttaaaccccaggactccatggtatgggtagtgtgaatacagacatggaactgtgtgaatacagacatggaactgtgtaggatttgactatcatgaacggtcacgcttggcaagcggtgtcagtaactaaaacttagacataccttctgtttataataaatcattcttgtcaatccagagtcaaatccacatgctcctgtagttcttcatattagctgcaattacttgagttagattttaagaggaattaaagatgatggttctcaatctttgagtataggttgatatgcaatcatcctatgcctgatattttctaatctccagaggaagcactactacattaatgtcatttaccatgtaaagggaattaatagaactttatcgctaataatgtgctataaatacattatggtcaatattttacttcctaagcacaacaggtaaaaataaaccatcctagtaccaaattaatgaatgtaagtatctccaatggagtcatgataaaacatttttttcaaggtccaccaggtcctcctgaggatgtgcaagtggaagacatttccagtactacttctcaactaagttggagagcaggcccagataataacagtcccattcaaatatttactattcagactcggacaccattttctgtgggttggcaggctgttgctacaggtgagtgacaaaagtgttttgggtcactttaaaaataatattttagtccaataattttaataaatgcaattacattttaaattaataattatataattttgtacaattatttgtttttgagtagtcccaacctaggtgccttagtgtctcattctttttagttccagaaattctcaatggtaagacatacaatgcaacagtggttggtttgagtccttgggtggaatatgaatttcgtgttgttgccggcaacagcattgggattggagaaccaagtgaaccatcagaattgttaagaactaaagcatcaggtaaagaatcaatgtgttctaaaagtgtggaagatttcgtatgatacagttcttaaaacaaaacaagtatttttatgtgtcttctaatacttttggctcaaaattgtttggcagtaaacgagtggctctcattttcttttatttttacatacacaaggcaaggtgtattttctccaaatagtaggttcaataagaaatgattacctttaagccaacatgtcaaaatcagagttcttaggaaactgtgtttgcatcgcatctattttctagtcaaaattcattagagaatctgtagatttgtatatgcaaatgagttactgcttgtttcattaaaatgttgtagccaggaattaactgagactctgttggtgcagtcagccatatattttcatctatttctcaactctgaactagttgtagcttcactgagcagtagtataaatttttttccatgcaaatgaggtaaatcctaagctcatttaacaggggcactaattgagcattaattggttcactgaacagcagaacgcaagaacctggatcagataccatgccttcttaagctcttttcaatggatcctctttgttccactcaaacttttacatccagggtgacatttaatctgctagctgtatatagcccacaaagttcacattcttattcgatcacataaacaaaggatcacttgtcatggctagcttaatttaacaaacacaaattaccttattaaagtgtgcacaattgtcagaagtcaataaatcaatccttaaactaaagataatgttatatgtttatcatagaattggggctagaaaaaggacatacttgacagtgatatcatccaattaaatcacgctagaagcttacagctgagaggaaatccctttgttttacagaagaggaaaatgaacaccaggatattagctggttgtttgtgacagagctaggttttgaatccaaacctcctgatttttacacccagcattctccataaaagaggatcttaatgtagatgagcaatagattagccaaagaaagtgtgtaaatatagaaattccccggccctcctatataccccctggatcagaatcttcaggtgttgtccatgactctggatatgagctttagtttcaggttgtttgtttacagttgatttatattttggtagctttggacagggttgacagaaactcttacattttcatagcaaagtttgtgtgccaccttctaaccattaatactctcttgtttcagtagcagaatgagactggtgatattcatacccactgagtcaaactctactaactgaaaacctactgagtctctcgtctctccctctctgtctctgacatcatcaaagactaacaacttgttctcaatatggttttaggcttaagtacaattaatttaaaattgaatagggaaaggaattttctatttctcagaacattggaaactttgtagaaagtaaatcaaaatataattcaaaatacttttccttacacagctaaactatgcaaagatcctgagatagtgtgcagttagtcactctaagctgtcaagcactataaattcagcaactctgtaaaatccactctgattcacatcgcttttgatcaaaggcattggaagtcttagaaaataaggtttaggttcacataacttctttctaaaaaattatgaagcttaaagctgacaaagttaagggtaaatttaaatacgaaaaggtatatctgaaaggtgcaattttgaaaaagaacaatcagattatcatatgactattttctggtcatgtttatagagctaaacatcagtatgaaatggaaataaataaaataagcaatctagatttatttaggtggtctatatggtggggaaaaatttgaaatgaggaattaaaacttacatattttaatccctgcctaccaatccccagacatatccaagtgcctcctcaaccaaccacctctcctattgttcagacatggtccagtatagacaatttcatgtaattccacatttaaaaagtataccctgctgatttagcgattatcacagatttaggatacttttgtcattacgtcaagaaaaataatgcttttaaacacttacgcatgtgtaaagtaaaacctcattctcgtgaggcactacaataccatatacacactcagcatttcctcagttttacagtttctatgatctattattcattgtgttagtccttacaaggatacagagttgaagggcatagttttttaaaactcatcaaaattactggtttctgaatcctctaccacagagccttagatcccaagaaataaatagaaagaacctctcccagtcgcattcttgacaggagaaaaacctgactttgcaagtgaaaagttagaagaaaatccctcttcttctctcccgagagatttgagattgtaacgaggagttttaaaacaagaatatttatttacatatttttcagtatttaattttaactggtaaaatatcctgatgactaataaaaggaaaaattagtttagtttgtttattgaaaaaaaataattaatatactgcctcagtaacttgtttacagctcaactgtataattaggcactaaatcagcagtgtcactgtcaccatctgaatggaacatcattttgccaattagtagatgatgcataatgatgtcaaatacccgatgttactcaatttttaattaattttggagccagggtgctcatgtatcaaacacaactgtgtcctctctcttagaaatttggatatgtgtaaacataatttacgttcattaaaaatgcaagactctctcacagtatgcctgtgtgagattttgaaaagtgaaattcaaaaacaaaattcttcctgatgaagacgtactttaataattgccatcccacatttctcttggttatttttagtccctgttgtggcaccagtaaacatccatggaggtggaggaagtcggtctgaactcgtcattacgtgggaggtaattttctgtccaactgagttattttgaagaaaagagatttaactggccagaaagaaactgaaaaacaaaaagatttatttgatcactattgagagcgtaaaaaaatatggtataaaaatacatcatcctgatgatgaattatttagaggaggtattaggaacttttctcatggtgagacagtatgacgaactcagcacaattttctcccaaatacacgaaaaacaacttcagtatctattgagcgtgtgtcagtagcattttcgttatcgcttgatgaattaggcattgtttgatttgttacctgtggcactgttgtattgtgaataagttgagcccagtagactgtaggcaaaaaatagttcttgtcctaaccctgctgttcacctctgatcaactcattcttccctgcatctagatgaaagcttaggcacatggagtagattttgtggtcattcttattacccattaacatacaggctcatttttttaccttattaaaaatttcagtctggtgtgtacacttcaaactggagtataaacgttagaatttagactttcaaccaatttaaagtttctcattttcagtatctcagtgcctcagcctaagaattctatagcgtgaaagggaatacgtggtcagttcaacttctctccattctgctctttaatttatctttccccattcacagtgttacctctggattctccagagctgtagaaggttggtgttggtaggggaggagaaaggaaaaggtctggattgctggtacatttctcgtttgactttggtgtgctctagttatggcaaattatcagacgctgccatttcatagggtagggtttctgcgttttttaatttattttttatctgggagatggccactggatgatcccccaccaaggactcccaactgcaattccttggtgcagacccaactggctgctgaagggtatcagttcctggattttggtggtccatttccagactcttccagtgaatattctctctcttgtaggtggtctttgtggatagagtccccttgaaggctgtccatggatgacccacttgcatgggtttcacatttgtcctcagcagacacataccctgctccatgtttagcggaagtgcaatgcatacccacttagcatctctcttcactctgccaccgtgggctgtctggatctcttccccactttaaatttctcagacatttgtcagttaaatgaacctgcgtcccttatgttccaggaaatgcaaaccaggtgtttcttgctgtagcctacttcacatagctaggctatgagagataactgggaaccagagacgttattctttatggttataaatgacagtgtcagaaactagatgcaattgccctgaaagtcaccctttcctctggatatcttgtttcatgtggacattataggcctagcacagtgcttggaaagtggtccaccctccatgaacacttgttgaatggaaggtagtgttttcagagagttggaactctcagaggccagacagagggggaaaccctattttttcaagcatttacaggatttcaggtgccacacagagcatttcatatcattcagtccccacaataatgctataaggtggttataccactttcaagtaagaaaactgagacttagaaaagtgacatcattgggcagagaagcatttgaacacagggttctctctttctgttcttttactgtatcctgtattacaatcccaattgtcttcatgcactgtgatggctgagggtgggcctgagtccttgagtatatctaccttaagtagtaagttaaccatattatacctactactccaaacatatttcccataaaacactgactttcaaatgagtctacaagagaattgtttgtgagtagtttatttaggtttctatattcatcaaaggccaaataagcattatcatcatagtgtacaggaagttttgcctgacttaataacttattttgttctcctccttggtaagaaattcctacaggctgttgttgcaattgcttgtacacagtctataatgagggcccaaatgctatgcattcattcttaaatagagatgagcatgaattaccaaagaatactgtctttccacgatttataatgttcttttttctttaaggcaaaggtacacaaaccatgacctatgagacaaatttgtctagtttcctgttttgataaataaatccacccatagctacatccattaatgtattgatgctttcttgctgttgcatgagaccatatatcccacaatgcttaaaatatttactatctggtagcaacaatagacgctagcgtctgctagagtgacgagaggaagggcgagggttgaaaaactagctatattaatgggtactgtgctcactacctgggtgacgggatccatcataccccaaacctcagcatcacacagtatatccatgcaacaaacttgcacatgtacccccgaatctaaaataaaagttgaattttttttttaagtttactctctggccctctacagaaaaagcatactaacccctatttttaaaaattaaactaaattaaagccacttcctctgtgtttattttttcttcctgaggaggaggtggggggtggatatctgatatgcagatacttgcagaaagtaaattagtgaaatcggtttcccatttatcactcatatttgacattatgtacaagcagatactgagccaacttcttctggtgcccagcttctttatggaataagttatgtatatttaggagaagattcatacattaggatgaatctgagccaccagaatgcaggtagtaattccttcaatttaatgaactctattaggtagcttctctgttcctatcagtggaatacaaaaatggatgagaaaaggtctgaatgctcagaagcgtagaggacagaatggtcttaacccagcctggaaggaggtcaggaaagacaccatcagaactgagtatatctgaactacgttttgaaaagtgacttggaagtagagaggccaccccaggtcaatgtcactcctgttgtagttgaaatagtacctgttggactttgaaaggcactgcgcgacacaagactgttctaagttcagtcacaatctgccattacgtttcataagtgacaactttaatgattatccttcatttaggctccctgtggtataatctgcctgaactgaactaaatatctttcccgtgttttccccagagccacacaataaatgtagattttttgtttatttgttttgatttggtttgtttccaaaaacctagacataatatcaaatttttagaatatagcaatgggtaattcctttttaagggcatgtttatacattattttatcataatgtgtatactcccaaatacttccaggtttgaggtgcttgtggtgaatgtctcataaatattactataaaattaggtacacaggataaagcactatagagtaagagatacatacctacactgagggttggcacgctttttatttaaagggccagacagtaaaaatattcagtctcgtgggccacatgacctcttttctaatgtctcagtctgcttttgtagctcaaaagagccacataccacttacaaacatataggtgtgggtgtgtctcaaaacctttattttcaaaaccaggctgcatgccagatgtggctagaagtacatagttttgctgattcttagtctgtactaaagatttggttcttacagacactgtggttgagaattacattattagtttatcaattttcatagattttactcccaggagaatttcacaatttctttattttactgaacactgtctccacttaaagaaaactctttttctggccttgttaaataactatatatattttttaatcatttgactctctgttgatgtaagaataaagggaagtatctaaataagtctcttttttcccctctaatctgcatatgttggactcaggtctttcttgagagagcaccatgagaaacactaattgtacttgactaacaaaaacaaaactcccctatttatgtagatgaactgactaagcatcgtgattaaatccgagatgaaagaaacttcagaaatgaatcaaatgctctagcaagtagcatcgattcttataaatctcttccatgccattcaaaattaactggtttacttctagtctccctatgaaaaagaagagaagtgttaatatgaggaaatactttgttgtttccccagatgtccggagcagcacttttcttcctcttttcactttctgtatttgttagactgttccacatggcaagaaatagagaccagctcaggtcatctcgggtaatgggggtttattttaaagctacatgggaagtaatgaggacaggaaaaaagtctcagcaagcaggcaggaaggtcagatgaagaaccggaacatggttcatcactgctctgggcactcgggcacaggagctctaggcaaccatcaacaacccctctgctgatccagccccggcttgaatagtctctcatgcttatgcctcagttcctcccatttcctttacttccagttttctacctggctgccagctaatttggatgccctctctctaatttacagcatctgttttctcttagcttctattgcctcactgttcctgctactccatgttctctactttttgcctgctctgtgtatatctatcattgttttgccacccaccatgtttcatatgcaaactctgtgagaggaattgaccaggtctgttagtcaccgtagagtacagagattctgccctcatagatactcaccaagacggtgcctgtggttctggcgctcgtgaattggtgctcgcatgggttccaagtggcaagtagatagtgtgattgatagaataaatggactcccatgaataaagagaacctctgaaatggagttgtggacatgagggactagaagcactgtgtcctgtcaggtgttgcctttattagtctgtcagaatatttattaaaaaaaaaaaagcaaagcattttccttgggaaaaaccaaataaattccattgatttttcaatacaagtttcttgccatcaggagatatgttggtctaaattcaagtacagattcattttaatttgctaagtttatgtgattgtttacaatttttagtatctgcagagtacagggggaatattaccaatttctattttgctattttagtaattttagatttgaaatgtattttatagaatctgatctttgtgagagttaacagtttattctttcatgtgaggaaaaatgcacacatgtcactaccaatgaagatgtatgcctaaaaaaatgatgggaggtcttttatacttttttaaagaaatattctgtgtcttaaagcatatgttatttcacagtaattccattacacatgtcttacaaaaacttgtttaaaatgttgtgaaaggaaaacatatctagtcttgaaataaatagttaagaagttaatttgtgctgagtttaaaaattcatatcaaaccacatttgagtgtgtatcataaaatcttttaaactgttttattattataatttatgaatgatcaaagaaaaatatataaatatgtaaagcttgttttatatttctatctgaaaacttaaactatttatctgagtatctttaactgggatcatttttctaattggcattccaaataaaagtgttttttaatacatcattaaacagaataaatatccatatttgtctctatggaagaaatgtgaaataatcaataaacattatagtagcttaataaaatatttttgcaaatactcagtgattgatcacattctgcccaagtcaattccagaagaactgcagaatggggagggatttggatatatcatcatgttccggccagtgggctcgacaacctggtccaaggagaaagtgtcatctgtggaatcatcaaggtttgtctacagaaatgaaagcatcatcccactgtctccctttgaagtcaaagtgggtgtgtataataatgaaggagaaggatccctgagtactgtgaccattgtctactctggggaagatggtaagttgtcctcaactctggttttctttgagactctatgcatagtttgtgttcccttgttccattttcaatgaaccactctgctaaagatggttatgtctttctctggatggtagaacctcaactggccccaaggggaacttctctccagagtttttctgcttctgaaatggaggtttcatggaatgctattgcctggaata

SEQ ID NO: 904 - DNA, 13217 bp, Homo sapiens
agatgtcatagacttaaaaaaaggagtggctcattttgaaaggattggaggagtaagttactgaaattgttaagtgcttaataaaatgaatcaagtcttttacatgaatcaccatttttcatagttactctctccatctttatttgcatggataatcactgactgtttttgaagctacatttgtttttgttttggtttattttgtttcgtgtcttccgtagaaatacttgttttctagatgtaattataataagggggataataaaagggtttagatacaagaaatgacaatgatactagtatatcttttaatttcagagttgttttatgtttcgtatttatccagctgtaacaataaagtaggacttgttatatgggcttacgtttttatccatttctccctttctgtctgcaggaatctgttggggatttgatgataaggaatattcagttacatcattcaggaaaatatctctgcacagtacaaacaaccctagaaagtttatctgcagtagccgatatcattgttagaggtaagcataaatggtgaaaaagtgatcacattgtttcttcacagttacagtgttcatatctaaattgtagacctctgagaaaccacaccatgttatggaagtgagatgtaatcagatagagttttattttttaaaccccaggactccatggtatgggtagtgtgaatacagacatggaactgtgtgaatacagacatggaactgtgtaggatttgactatcatgaacggtcacgcttggcaagcggtgtcagtaactaaaacttagacataccttctgtttataataaatcattcttgtcaatccagagtcaaatccacatgctcctgtagttcttcatattagctgcaattacttgagttagattttaagaggaattaaagatgatggttctcaatctttgagtataggttgatatgcaatcatcctatgcctgatattttctaatctccagaggaagcactactacattaatgtcatttaccatgtaaagggaattaatagaactttatcgctaataatgtgctataaatacattatggtcaatattttacttcctaagcacaacaggtaaaaataaaccatcctagtaccaaattaatgaatgtaagtatctccaatggagtcatgataaaacatttttttcaaggtccaccaggtcctcctgaggatgtgcaagtggaagacatttccagtactacttctcaactaagttggagagcaggcccagataataacagtcccattcaaatatttactattcagactcggacaccattttctgtgggttggcaggctgttgctacaggtgagtgacaaaagtgttttgggtcactttaaaaataatattttagtccaataattttaataaatgcaattacattttaaattaataattatataattttgtacaattatttgtttttgagtagtcccaacctaggtgccttagtgtctcattctttttagttccagaaattctcaatggtaagacatacaatgcaacagtggttggtttgagtccttgggtggaatatgaatttcgtgttgttgccggcaacagcattgggattggagaaccaagtgaaccatcagaattgttaagaactaaagcatcaggtaaagaatcaatgtgttctaaaagtgtggaagatttcgtatgatacagttcttaaaacaaaacaagtatttttatgtgtcttctaatacttttggctcaaaattgtttggcagtaaacgagtggctctcattttcttttatttttacatacacaaggcaaggtgtattttctccaaatagtaggttcaataagaaatgattacctttaagccaacatgtcaaaatcagagttcttaggaaactgtgtttgcatcgcatctattttctagtcaaaattcattagagaatctgtagatttgtatatgcaaatgagttactgcttgtttcattaaaatgttgtagccaggaattaactgagactctgttggtgcagtcagccatatattttcatctatttctcaactctgaactagttgtagcttcactgagcagtagtataaatttttttccatgcaaatgaggtaaatcctaagctcatttaacaggggcactaattgagcattaattggttcactgaacagcagaacgcaagaacctggatcagataccatgccttcttaagctcttttcaatggatcctctttgttccactcaaacttttacatccagggtgacatttaatctgctagctgtatatagcccacaaagttcacattcttattcgatcacataaacaaaggatcacttgtcatggctagcttaatttaacaaacacaaattaccttattaaagtgtgcacaattgtcagaagtcaataaatcaatccttaaactaaagataatgttatatgtttatcatagaattggggctagaaaaaggacatacttgacagtgatatcatccaattaaatcacgctagaagcttacagctgagaggaaatccctttgttttacagaagaggaaaatgaacaccaggatattagctggttgtttgtgacagagctaggttttgaatccaaacctcctgatttttacacccagcattctccataaaagaggatcttaatgtagatgagcaatagattagccaaagaaagtgtgtaaatatagaaattccccggccctcctatataccccctggatcagaatcttcaggtgttgtccatgactctggatatgagctttagtttcaggttgtttgtttacagttgatttatattttggtagctttggacagggttgacagaaactcttacattttcatagcaaagtttgtgtgccaccttctaaccattaatactctcttgtttcagtagcagaatgagactggtgatattcatacccactgagtcaaactctactaactgaaaacctactgagtctctcgtctctccctctctgtctctgacatcatcaaagactaacaacttgttctcaatatggttttaggcttaagtacaattaatttaaaattgaatagggaaaggaattttctatttctcagaacattggaaactttgtagaaagtaaatcaaaatataattcaaaatacttttccttacacagctaaactatgcaaagatcctgagatagtgtgcagttagtcactctaagctgtcaagcactataaattcagcaactctgtaaaatccactctgattcacatcgcttttgatcaaaggcattggaagtcttagaaaataaggtttaggttcacataacttctttctaaaaaattatgaagcttaaagctgacaaagttaagggtaaatttaaatacgaaaaggtatatctgaaaggtgcaattttgaaaaagaacaatcagattatcatatgactattttctggtcatgtttatagagctaaacatcagtatgaaatggaaataaataaaataagcaatctagatttatttaggtggtctatatggtggggaaaaatttgaaatgaggaattaaaacttacatattttaatccctgcctaccaatccccagacatatccaagtgcctcctcaaccaaccacctctcctattgttcagacatggtccagtatagacaatttcatgtaattccacatttaaaaagtataccctgctgatttagcgattatcacagatttaggatacttttgtcattacgtcaagaaaaataatgcttttaaacacttacgcatgtgtaaagtaaaacctcattctcgtgaggcactacaataccatatacacactcagcatttcctcagttttacagtttctatgaactattattcattgtgttagtccttacaaggatacagagttgaagggcatagatgtttaaaactcatcaaaattactggtttgtgaatcctctaccacagagccttacatcccaacaaataaatagaaagaacctatcccaggcgcattcttgacaggagaaaaacctgactttgcaagtgaaaagttagaagaaaatccctcttcttctctcccgagagatttgagattgtaacgaggagttgtaaaacaagagtatttatttacatatttttcagtatttaattttaactggtcaaatatcctgatgactaataaaaggaaaaattagtttagtttgtttattgaaaaaaaataattaatatactgcctcagtaacttgtttacagctcaactgtataattaggcactaaatcagcagtgtcactgtcaccatctgaatggaacatcattttgccaattagtagatgatgcataatgatgtcaaatacccgatgttactcaatttttaattaattttggagccagggtgctcatgtatcaaacacaactgtgtcctctctcttagaaatttggatatgtgtaaacataatttacgttcattaaaaatgcaagactctctcacagtatgcctgtgtgagattttgaaaagtgaaattcaaaaacaaaattcttcctgatgaagacgtactttaataattgccatcccacatttctcttggttatttttagtccctgttgtggcaccagtaaacatccatggaggtggaggaagtcggtctgaactcgtcattacgtgggaggtaattttctgtccaactgagttattttgaagaaaagagatttaactggccagaaagaaactgaaaaacaaaaagatttatttgatcactattgagagcgtaaaaaaatatggtataaaaatacatcatcctgatgatgaattatttagaggaggtattaggaacttttctcatggtgagacagtatgacgaactcagcacaattttctcccaaatacatgaaaaacaacttcagtatctattgagcgtgggtcagtagcattttcgttatcgcttgatgaattaggcattgtttgatttgttacctgtggcactgttgtattgtgaataagttgagcccagtagactgtaggcaaaaaatagttcttgtcctaaccctgctgttcacctctgatcaactcattcttccctgcatctagatgaaagcttaggcacatggagtagattttgtggtcattcttattacccattaacatacaggctcatttttttacgttattaaaaatttcagtctggtgtgtacacttcaaactggagtataaacgttagaatttagactttcaaccaatttaaagtttctcattttcagtatctcagtgcctcagcctaagaattctatagcgtgaaagggaatacgtggtcagttcaacttctctccattctgctctttaatttatctttccccattcacagtgttacctctggattctccagagctgtagaaggttggtgttggtaggggaggagaaaggaaaaggtctggattgctggtacatttctcgtttgactttggtgtgctctaggtatggcaaattatcagacgctgccatttcatagggtagggtttctgggtttttttatttattttttatctgggagatggccactggatgatcccccaccaaggactcccaactgcaattccttggtgcagacccaactggctgctgaagggtatcagttcctggattttggtggtccatttccagactcttccagtgaatattctctctcttgtaggtggtctttgtggatagagtccccttgaaggctgtccatggatgacccacttgcatgggtttcacatttgtcctcagcagacacataccctgctccatgtttagcggaagtgcaatgcatacccacttagcatctctcttcactctgccaccgtgggctgtctggatctcttccccactttaaatttctcagacatttgtcagttaaatgaacctgcgtcccttatgttccaggaaatgcaaaccaggtgtttcttgctgtagcctacttcacatagctaggctatgagagataactgggaaccagagacgttattctttatggttataaatgacagtgtcagaaactagatgcaattgccctgaaagtcaccctttcctctggatatcttgtttcatgtggacattataggcctagcacagtgcttggaaagtggtccaccctccatgaacacttgttgaatggaaggtagtgttttcagagagttggaactctcagaggccagacagagggggaaaccctattttttcaagcatttacaggatttcaggtgccacacagagcatttcatatcattcagtccccacaataatgctataaggtggttataccactttcaagtaagaaaactgagacttagaaaagtgacatcattgggcagagaagcatttgaacacagggttctctctttctgttcttttactgtatcctgtattacaatcccaattgtcttcatgcattgtgatggctgagggtgggcctgagtccttgagtatatctaccttaagtagtaagttaaccatattatacctactactccaaacatatttcccataaaacactgactttcaaatgagtctacaagagaattgtttgtgagtagtttatttaggtttctatattcatcaaaggccaaataagcattatcatcatagtgtacaggaagttttgcctgacttaataacttattttgttctcctccttggtcagaaattcctacaggctgttgttgcaattgcttgtacacagtctataatgagggcccaaatgctatgcattcattcttaaatagagatgagcatgaattaccaaaagaatactgtctttccacgatttataatgttcttttttctttaaggcaaaggtacacaaaccatgacctatgagacaaatttgtctagtttcctgttttgataaataaatccacccatagctacatccattaatgtattgatgctttcttgctgttgcatgagaccatatatcccacaatgcttaaaatatttactatctggtagcaacaatagacgctagggtctgctagagtgacgagaggaagggcgagggttgaaaaactagctatattaatgggtactgtgctcactacctgggtgacgggatccatcataccccaaacctcagcatcacacagtatatccatgcaacaaacttgcacatgtacccccgaatctaaaataaaagttgaattttttttttaagtttactctctggccctctacagaaaaagcatactaacccctatttttaaaaattaaactaaattaaagccacttcctctgtgtttattttttcttcctgaggaggaggtggggggtggatatctgatatgcagatacttgcagaaagtaaattagtgaaatcggtttcccatttatcactcatatttgacattatgtacaagcagatactgagccaacttcttctggtgcccagcttctttatggaataagttatgtatatttaggagaagattcatacattaggatgaatctgagccaccagaatgcaggtagtaattccttcaatttaatgaactctattaggtagcttctctgttcctatcagtggaatacaaaaatggatgagaaaaggtatgaatgctcagaagcgtagaggacagaatggtcttaacccagcctggaaggaggtcaggaaagacaccatcagaactgagtatatctgaactacgttttgaaaagtgacttggaagtagagaggccaccccaggtcaatgtcactcctgttgtagttgaaatagtacctgttggactttgaaaggcactgcgcgacacaagactgttctaagttcagtcacaatctaccattacgtttcataagtgacaactttaatgattatccttcatttaggctccctgtggtataatctgcctgaactgaactaaatatctttcccgtgttttccccagagccacacaataaatgtagattttttgtttatttgttttgatttggtttgtttccaaaaacctagacataatatcaaatttttagaatatagcaatgggtaattcctttttaagggcatgtttatacattattttatcataatgtgtatactcccaaatacttccaggtttgaggtgcttgtggtgaatgtctcataaatattactataaaattaggtacacaggataaagcactatagagtaagagatacatacctacactgagggttggcacgctttttatttaaagggccagacagtaaaaatattcagtctcgtgggccacatgacctcttttctaatgtctcagtctgcttttgtagctcaaaagagccacataccacttacaaacatataggtgtgggtgtgtctcaaaacctttattttcaaaaccaggctgcatgccagatgtggctagaagtacatagttttgctgattcttagtctgtactaaagatttggttcttacagacactgtggttgagaattacattattagtttatcaattttcatagattttactcccaggagaatttcacaatttctttattttactgaacactgtctccacttaaagaaaactctttttctggccttgttaaataactatatatattttttaatcatttgactctctgttcatgtaagaataaagggaagtatctaaataagtctcttttttcccctctaatctgcatatgttggactcaggtctttcttgagagagcaccatgagaaacactaattgtacttgactaacaaaaacaaaactcccctatttatgtagatgaactgactaagcatcgtgattaaatccgagatcaaagaaacttcagaaatgaatcaaatgctctagcaagtagcatcgattcttataaatctcttccatgccattcaaaattaactggtttacttctagtctccctatgaaaaagaagagaagtgttaatatgaggaaatactttgttgtttccccagatgtccggagcagcacttttcttcctcttttcactttctgtatttgttagactgttccacatggcaagaaatagagaccagctcaggtcatctcgggtaatgggggtttattttaaagctacatgggaagtaatgaggacaggaaaaaagtctcagcaagcaggcaggaaggtcagatgaagaaccggaacatggttcatcactgctctgggcactcgggcacaggagctctaggcaaccatcaacaacccctctgctgatccagccccggcttgaatagtctctcatgcttatgcctcagttcctcccatttcctttacttccagttttctacctggctgccagctaatttggatgccctctctctaatttacagcatctgttttctcttagcttctattgcctcactgttcctgctactccatgttctctactttttgcctgctctgtgtatatctatcattgttttgccacccaccatgtttcatatgcaaactctgtgagaggaattgaccaggtctgttagtcaccgtagagtacagagattctgccctcatagatactcaccaagacggtgcctgtggttctggcgctcgtgaattggtgctcacatgggttccaagtggcaagatagatagtgtgattgatagaataaatggactcccatgaataaagagaacctctgaaatggagttgtggacatgagggactagaagcactgtgtcctgtcaggtgttgcctttattagtctgtcagaatatttattaaaaaaaaaaaagcaaagcattttccttgggaaaaaccaaataaattccattgatttttcaatacaagtttcttgccatcaggagatatgttggtctaaattcaagtacagattcattttaatttgctaagtttatgtgattgtttacaatttttagtatctgcagagtacagggggaatattaccaatttctattttgctattttagtaattttagatttgaaatgtattttatagaatctgatctttgtgagagttaacagtttattctttcatgtgaggaaaaatgcacacatgtcactaccaatgaagatgtatgcctaaaaaaatgatgggaggtcttttatacttttttaaagaaatattctgtgtcttaaagcatatgttatttcacagtaattccattacacatgtcttacaaaaacttgtttaaaatgttgtgaaaggaaaacatatctagtcttgaaataaatagttaagaagttaatttgtgctgagtttaaaaattcatatcaaaccacatttgagtgtgtatcataaaatcttttaaactgttttattattataatttatgaatgatcaaagaaaaatatataaatatgtaaagcttgttttatatttctatctgaaaacttaaactatttatctgagtatctttaactgggatcatttttctaattggcattccaaataaaagtgttttttaatacatcattaaacagaataaatatccatatttgtctctatggaagaaatgtgaaataatcaataaacattatagtagcttaataaaatatttttgcaaatactcagtgattgatcacattctgcccaagtcaattccagaagaactgcagaatggggagggatttggatatatcatcatgttccggccagtgggctcgacaacctggtccaaggagaaagtgtcatctgtggaatcatcaaggtttgtctacagaaatgaaagcatcatcccactgtctccctttgaagtcaaagtgggtgtgtataataatgaaggagaaggatccctgagtactgtgaccattgtctactctggggaagatggtaagttgtcctcaactctggttttctttgagactctatgcatagtttgtgttcccttgttccattttcaatgaaccactctgctaaagatggttatgtctttctctggatggtagaacctcaactggccccaaggggaacttctctccagagtttttctgcttctgaaatggaggtttcatggaatgctattgcctggaatagaaacactggaagagtgctgggctatgaggtaatccacattaatttcacttttgcttatgaatgtgccaatggacttcgcaatagctcctattcaacagtcctatcctactagcctgttgttagcatatgataatgtgtgtctaaagctaaagcagagaatgaagttgagacagggtaggtgagcccccacattgagaggcttagcctgggatgtttcttgtcctcgctcaagacagaattcgagagtgagccagtggtaaaaaaacaaaaacaaaaacaaaaacaaaaaaaaacagctttattgaggcagcagtgttacagttttgaaattgcttctgcagagcagggctaccccataggcagtgtgctaagagcagcagcttggaagcagttctacactcatatttatacccacttctaattacatgcaaattaatgggtgagttagttattcagaaatttctagaaaaagggtggtaacctccaggccattgccatagaaagggatggtaacttccaggtgttgccatggcagtggtaaactgatacggaactggtggttgtgtcttatggagaggtgctttagcctcttccctgtttcagtcagtcttcaatctggtccacagtaaagtcctgcctcctccctcaaagtaagggaaatctttctaggtaattcaaagcaaacaaattaacacatagtagccatttttaaaggcatacagattcagtaagtaagatgagtaagctctaaagatctgctgtacaactgtgcacacagagtcaacaattatgcattgtacccttaaaatttttcaagaggacagatctcatattaagtgttcttaccacaacatcatttttcaaaagtgatcaggtgattatatgattaattattcaaattgcagtcatttttttttcccttggtaagaggtgaagtctgctcctcaatcatcttacaccatggaagaatttcattgagaaacctgctttgtgaattgcagtataacttggaaagatgtaatcatctcagaaaaggcagttaagtaatgaaaaaaaatacctagattgtcttgaatctgctatttttagtctatgaagaataaggcaaattacatttgtaggccttcatctcacaaagtaaagagacaagaacattttaagggaaagttgttcatcactcaatctttttcaacttgcaaattcagtgattcacaaaatgggtaacataatttatttaactttggatttagaataaatgtataatcctaaacattcttaattttgcctatatatatatatatatatatacacacacacacacgtatacatatacatactatatatacacacatatatatacatatatacacatatatatacatatatatacacatatatatatatatatatacacacacacacacacatatatatatatatatataaccataatcctctgattccaacagaaagttctactctcaggacaggtgtcttttccactccatgccaagaatgccttacctcttatctgaaccctagttacttctcaaatttcatccctagtcgcctcttctctctgagctctactcccatcaattcctgatgtattttgtcaaattcttgtagcatattttttctataccacttctttgcaatgcattctgtgacttattttcacatacactgtggattctaacctcttagctagatgataaggggcttgaaaataggtacttaatttattctctttttttttcaatgtacctaaaacaatgctaatgcaaaggtagggttcagtataaattgaattattaattaacctgtgattcaaataactctgaaaagaaatgccaatagcaagacattataatgaaagtctttgactgattatatacaaatgtgtttttgtctgacttgttatacatcatttgctaaagctggtaacctttagatagctcataaaatactttattttggtaatctaaaaaatcacgttctctaatttccattgtgaatttgcattcatgacttttttcctcataaatattagagaataacaattttgttgttgtataaccattttaattagaaaacgtttttgtcatctatacttctgtcttcttcccatattccttgtggttgtggttgatagttgttggtaaaaaatgattgatagttattggggaacaataaattgcttgttttggtttttaattatcaggtcttatactggacagatgactccaaagaatcc

SEQ ID NO: 905 - DNA, 107 bp, Homo sapiens
tcagttgcctacctataaaatgaggaaaaagtcatatttatgttttcataggttttgttcaagattgaaagagattattaataataagtgtccagtacacaccttaa

SEQ ID NO: 906 - DNA, 107 bp, Homo sapiens; identical to SEQ ID NO: 905

SEQ ID NO: 907 - DNA, 1186 bp, Homo sapiens
aggtgcaggagctggaccctgtggtagggtggaggcccgccccaagcctggactatcgcgtgtgcctgccctacgccaacgcagtgctgctcgagatccagtgcttcatcagcgtggtgcccctggggctgccgcgcaccctcaccctcgacacccacctgcacagccactgtctgcccaaaggtacccactgagtctggggatcccgtgcgggacccgggtgcatgagatcagccagaatcagcaggtgtgcgctgtgcagaccaaaacacaatcagttacccctggagcaggaaggcagctctgccttcccttaggctttttgttgttgttgtttgagacggagtctggctctgtcattcaggctagaatgcagtggcatgatcttggctcactgcaacctccacttcctgggttcaagcgattgtcctgcctcagcctcctgagtacctggtattacaggcacccaccaccacgcctggctaatttttgtatttttagtagagacaggtttcgccatgttggccaggctggtctcgaacttctgacctcaagtgatctgtcctcagcctcccagagtgctgggattacaggcgtgagctacttgcccggcctattcccttgggcttttaaaaagcgtcttggatggaggtggtgcaggtgctcaccaagcccgcaggtaacccaagttgcatgtatccccagggcacttttgtgattcccctgcttgtgactgcacaccgggaccccactcaattcaaagacccagactgcttcaaccctaccaacttcctggacaagggcaagttccagggcaatgatgctttcatgccctttgcctcaggtgcaggcagaggaggaaggggaccagcctggactggctctggggtacctggtgctcactgtgcacctgtgtacccggcaaagcagatgtgcctgggcacaggcctggcccactcgggtatcttcctattccttacggccaccttacagaggttctgcctgctccctgtggtacgccctggcaccatcaacctcacctgcagtgcactggcctgggcagtgtccccccagacttccagctccagccagtggcctgctgaggtcaggctccactatggtgggctcactggccctcaaacctccataccctcctcggtcaataaaggccctaaattgcagatgg

SEQ ID NO: 908 - DNA, 1182 bp, Homo sapiens
aggtgcaggagctggaccctgtggtagggtggaggcccgccccaagcctggactatcgcgtgtgcctgccctacgccaacgcagtgctgctcgagatccagtgcttcatcagcgtggtgcccctggggtgccgcgcaccctcaccctcgacacccacctgcacagccactgtctgcccaaaggtacccactgagtctggggatcgtgcgggacccgggtgcatgagatcagccagaatcagcaggtgtgcgctgtgcagaccaaaacacaatcagttacccctggagcaggaaggcagctctgccttcccttaggctttttgttgttgttgtttgagacggagtctggctctgtcattcaggctagaatgcagtggcatgatcttggctcactgcaacctccacttcctgggttcaagcgattgtcctgcctcagcctcctgagtacctggtattacaggcacccaccaccacgcctggctaatttttgtatttttagtagagacaggtttcgccatgttggccaggctggtctcgaacttctgacctcaagtgatctgtcctcagcctcccagagtgctgggattacaggcgtgatgacttgcccggcctattcccttgggcttttaaaaagcgtcttggatggaggtggtgcaggtgctcaccaagcccgcaggtaacccaagttgcatgtatccccagggcacttttgtgattcccctgcttgtgactgcacaccgggaccccactcaattcaaagacccagactgcttcaaccctaccaacttcctggacaagggcaagttccagggcaatgatgctttcatgccctttgcctcaggtgcaggcagaggaggaaggggaccagcctggactggctctggggtacctggtgctcactgtgcacctgtgtacccggcaaagcagatgtgcctgggcacaggcctggcccactcgggtatcttcctattccttacggccaccttacagaggttctgcctgctccctgtggtacgccctggcaccatcaacctcacctgcagtgcactggcctgggcagtgtccccccagacttccagctccagccagtggcctgctgaggtcaggctccactatggtgggctcactggccctcaaacctccataccctcctcggtcaataaaggccctaaattgcagatgg

SEQ ID NO: 909 - DNA, 8165 bp, Homo sapiens
tcagatgtgtgcagctctgaggtaaacttttatttcttggctgacaggacttccacacccatgctcctcctggcaccttttactctgcccaagcagtggcagcccagtccaaaaggtgcctgccatggccaaaggggttggggagtcacttcacattccaggctggaggagtgagaggacttgggggtactcctcccaccccattgccagcaagaggccatgactcacctcaaccccaagtcctgcatcctggtgggaagtgacaatgcctcctcccagctctccatacctaatggggtcatgaccagacagggtaggacccaggcccccagcttcagttggtaacggtggcctccacggctgccccctgtccaggtgacaaccccagcccccatgatggggcagcaaaggtctcttctcctccttggtcctcagcaacagacagagccctccacaccaggcaggacagaggcaaagtcagaagcagcagcggtggcagggaaggagcagccagcacaggcccagggctctcctgaagtcatttaagctgtctgccatgcggctctgggactggccactaggtgggcgtaggcggctgtgatacaggtacttggacacctttctgtcctgatgctgggggtgagaggggacaggagacagtgagtcatcagaaggacaaagaagccaagggaaacctggggagatggggagaggaccaggaagaaatggggctcctgttggggtaccaggagagtgggctaaggaaggtgggcagagatgaagaaaaatgagtggtgggatttaacaagaggctgatgagggggatggggtggcatcaggcccaagagggcccacagaataggaaggactgaagggagggaagcaggtacctagctgatacttgtctttggctgctgcccgctccttggcatcaaaataccagacagtgatggcgtacctggagaccagggtggttggacattagttttctgcaattccagctaccatatccacacacactaggcggccatccttttgagccacccggttctgctcccacctaggccccctctcaatacttcgtcgctccctagtcactctgaggctctgacaggacattgtcacagggggagcacctgggtgcgtctccagaagtacaggtcatacctggtggcataggctggcttcacctcgtgggggttccgccggtcagaccagaaaatgagcaaccggtcaaagagtggctcgatgttggctaccacgggccggccctcagggaagatctgcagcaggccgccatgcacctgggggcaggccaaaggatgaggctagctggtacggccaggagccgctgcctcccacggtgccccgggagcccactaggaggcgcagcgtctgcctgcatcactccctcccacccctcgggctctcaaagtgaatgacaacccagagactgcatcaccatggagatgggcaggaagctactaaagacaggaaaagggggaaagtgttcattacaaggccgggtggggctgggcagacagcaccattcccggaaagaggggagttcccaccacacagtccgctagagaggaggaggtgccatttcccaggaagagccggcagatcgcactgcccgctgtgtgttgagaagagaaacaggagaatgccagaatctgggctgagagtggaaaatggagtggacgcacgccacccccgccccagccctagccccagcgccaccctcaccctcaccctcacccctaccttaacgtcccagttctgattcaggtaatagatacaggtgatgcagcgcccatcgccgtggggattgtcaacgtgccttacgtacccgagcccgttgcctgggtaacacgccaccatggcctggcagggatggagggaggtaggtttactggggctaggcaggcacatcttagagaagcagccatgaattacctattttcccacccctccttgccccatcttccccatgactccttgggtcaagggttccaagctcctgccccaaaagactttctttttcagccaaaatcccatccccaagtctatcagaaacctcagctcctgggcctcaagagcccactccctcccaacacacatacctggggcctggcacccagctagggctcaattagtaacagagtttgatttgtttcaagataccccaaaccccacctcagccatttcagtagaataataccaatttaaacattttcaggtgtgcaaggaggtggcctcacagccctagaccaggaattcttacccttggctgtggagtggagccccctggggagctctgaggttctgaagtacctggcctaaggaagggcctgaaattggtaaagcttcccaggtaattctaccatgcagcaatgttaagaactgctgccctggactacaaagaatccccactaaattatctgtcccatagacctccgaacaggagccaaaagctacagtctgaatagaaagacctaattccaactccaaggataatttgctgggtaaccctagccagttccaacacctgaatgggcctcaactgcctgatgtgtacagcaggggtaataaacactgctgtttacagcggtagcaattaatctctctgagaacataacttgggaggttctggagccccaactcctggagatctaacaggactcattgcagggcttggtttctctgtctacagggttctttcctctgcctgacagttgccactcccctgacccagccctacaatgctgtggccagggccccgggatgtttgtcatcagggagctggcagaaaggtggctgagaggtaaaggaaatggcccagccacttctgcagacacaattccctggttcaagtctcagtgctgccacatgagctgtggcatcaggcaggtgacttcctggtctcaggttcctcatccatggatccaatggagctcacagctatttcacaggttgttgtggaacaagtgaacaagataacaagtgtctgggaagacagccagcacagtgcctgccacatggagaactggagcacaggctgaaatgccatttaaaaattttaaaaggtccctgtcccaccctctgcccaaagtcactgcagtggcaagatgaggtagcacacaaaaaggggaggactggcacaaggacccttcaacttctccccagcccggaccatctgtcttgacctctctgccctgacctctctgccctggtacaactctgctggcgtccattccccacgaatgctcagctacacctatgggcccggcccagcaagacagtcccaagataaacattcacgatcaaacatcagtggccactgccacaacaggatgcttgccaagcacgcacgccacagcagactgggctgcttcaatcctcaccctccccaggacgcctcccaacacattatcccagggctcaccctctgtggtggatgttaagctgctctgcattaaccatgtgcacctcatccaccagaccttgccctggaaagagagggctgccaccatctactgccacctagcagtgggaagctgacaaccttctctctggcagcaccagagtacaattagtgagaaggccccccagggaaaaccctaatggctacacttcaaggttcaggagggggcaccttctttgcactgctcactccctatggaagggtcggcactctgagcaaccacctcactgggagaagaattgggccatggtccaggaggcttagaaacagtgagttactgactagagatgggcaagacctccccaattaggaatccaatcagagattacactgatgatgcacgtggatgggtggcagggaaggggtccagtgctgcaccctcttcccacaattcatccccacacagcagccagagcccctcctctccaggtcttcactccatcctgagaaaatacaaattcccaaccacagcctcaaaggcccccaacctcatgtgcctctcccatcactctgctccatgcctcaacaggctgagctcatcgccaccacaaggcctcagcactggcctgggacactcttccttctgaccctctttgttattcaggattcagagaccaagggtcaccttgagtactccggctgattgtccgttccactcctagcaacatggcatcagcacaggcacctgtttacctagtactgccctggaaggcagccacagggaagcccctggggccaggttggtctccccagtgcccagtgcagtacctgcagactggagtgcactgctctgggcctcctctgcaccccagccctgctatgtttcctcctgccctgtacattctcacacagcgcctcccaccaagcacatgggactcacacagaaacaggaacctgctctttagggccccacccttcccccacatatacacaccttgggggtgaaagcatcctctggccccaaggaaagtatctacttcctgccctcacaggggaaggcctcaggaaacttgctctccacccctcccacctaggggagggacaggtgggaccagggccaggagaccaaagacttaaaggctattggtgacaatctgcctgccaagagccccacccccactacacacacaccccagtcagaagcctgtgactgtcccacctccaagctgctcttcaaggagcaaaccaagcaagctggactctccctggggtcccctctggtagcccttgctgccagtgggagtcaactctctcccacctacaggtcaacggagcacctgtccccaaccagggagttgggggaaggaaggatgacacaggagctccactcagaacgactaagaagcacgtttctactggctctagccacactggtgatccatgtccccacggcaactgctgcagcccacctgagcaccccacagccttactctggagtacaggagagagtccagatggggcccatctaaaagcgggaaagcctggagttgctgtctcactggggaggggagggctcctcccctatgttctcagtccagcctggcctgtccttacttccctaggacaatcaaggtcacctagggctaaaaaagtccaaacacgccccttccccaatcctcgctggggccctgtccccaaccacatagaaagtgggcaccagaggcaccaaaacacaagagatcttctcctactctcccctccccaaactgccagactcactggggatgtaacctggttttcgtattccgtggatcagcaaattgaggctcagagcagtgtcccatctgggccactcagcccttctggtctccccctgacgaggacgacagccaacctggggtgaagatgctgagccagggaggccactgatcccgcccgcacaggagccaagcccagggaggggccggctctggctcagctatcaagtaacgggagggagagggaagtagaacaagttccagctggggtggggaggaaacaggccttggccccgggggagccctggtccctgagccagctccagcctgagaggaaagccacacagaagcagaacccaagatgggatctgcaggaggaggcagaggacatcaggagctcagcctcacgcctgcagggcacaacactgcccgtgccatcagccagccaggcatcactgtgttgagcagtgggcactccccacagggccttgtccaaaggacaccaagccttggactcaaggccaggcccccacaccacccatgaagacaatgatcctgtcagcagcccggaaaggccctatggaccactgtcctgtgctgggctcctgaccccaggttcctgaacaggcagctggaggccatgaggccttgacaactgcccggaaactccaagcaaatgagcatttgtcttaagagaggatctgtggcctctgacagattctcaaaaagacccaggctccaaaataccattaagaactattgttctaaagcaaaaagaaaaagggactaagaacaaacacataaaggcagaggaagagacagacatgggtagggaggaagtgacacacaggacagggggaatggagggcagggactgggacagtgaagggtgggagacatggggatgagctccacctgggccaacaggcagccacccagtaccacccccaggagactgtcctcgatgcagatgccacagtggggacccagggcacaatgcagtccagggccaagcactcggcccagcgggcagcacccctttccttccctcagcccagggctcactcatcacagccaccctcccccttctgcttctcctgccttggagacaggatggatggactagaaacatgggccagcaaacagggatggacgacaggagcacagggaaggatgtggacagggacagacagcaacagagaacggccaggtgaactgtgtgcctatctacatccccgtgcttggtctggggccacagactgacaccaggaggccatgaaccccaccaaggtccacgctgtgaatgtcagcagctctcatgagtttaagagggttcctggcaaagtcaagaaccactgtggcgatgcttgaaggcagcatgctcgttaagagtcatcaccactccctaatctcaagtacccagggacacaaacacgcagaaggccgcagggtcctctgcctaggaaaaccagagacctctgttcacttgtttatctgctgaccttccctccactattgtcctgtgaccctgccaaatccccctctgcgagaaacacccaagaatgatcaataaaaaaagaaaagaaaaaaaaaaaaaaaaaaaaagaaccactgtggctccaggacaaactcctagcttatcaggtgcacacattaaggcccgtagggaggataaagacccccccaagtccccacaagtaagcatacccactccactgaactgcctaaaccttctgtgacctcccagaagcctgtctccaaacccactgtgctcagagcactgaatgctgcaaaccagggtgctgcaaagcccctccaaagaggcccccacctagccttaccttggtgcgcccgttgatgacatagctgcccagccgccctgcgcagtggcggatgacggcgtccacatgggccatgagggcaccaatgcttcgacagcctggttcatggccttccacccaggcaatctggtccccacggatgctgcgcggcgggatcgccctctggctcactagctgcccgtctcgcaggcgcccaccccgtttgagggcctccacctcggccagcacgcgaccgcccagtgctgcccccaggaagctgtccttgacgcagatgccgtagtaccgcatgcagggcacgatatagtccagggccaggcgctcgggcgcagagggcagcgcctcctccatcagcccagcactggcctcaccactgccactgctgcagctgcagctcatgccaccctcccgctctgcctcctggttctcttgcctggcccagggccgtttgctgggtgaaggggcatccccaccatcctcggcccatttccgtttgggggcctcaggccgtgcgccctgggctgccaatcgctggcaccccttggtgaccagcgctgcagcgccttcactctgcagcggccgcagctcaccaccatcctgcccgccaaaaccgtcccgaagagggctggcagtggtagaggtggctgtggctctgggggtcccactccctgccgaggcctcactaggcactcctggacagtggtaggaggggagcaggggacagggcaggtaactctccactcccatcctggcccggccaggctcaggctccaagggctctgacgaagaccctggtaactgagggagagcctgacttaggggctgcggctggcacgggctgtccatggcagcagtgtcttcatcccccgggcatggagggcaccgcccgggcccatggtgccaccctcctccgcctcctcctccgcctccacttgatgcagctgggggccaccgggcctggcgtggggcagggtgaggcagggcagacagcaagagctcttctcgtgccctgggggttgcttgctggtccccaagtcctctgcggtccctaagggcttgggaagggacccttcagggtggctagagaaaggaaaaaaaaaaagggatgtgagagaaactagagacaggcaggcaggggaaagc

SEQ ID NO: 910 - DNA, 8159 bp, Homo sapiens
  SITE (835): n equals a,t,g, or c
tcagatgtgtgcagctctgaggtaaacttttatttcttggctgacaggacttccacacccatgctcctcctggcaccttttactctgcccaagcagtggcagcccagtccaaaaggtgcctgccatggccaaaggggttggggagtcacttcacattccaggctggaggagtgagaggacttgggggtactcctcccaccccattgccagcaagaggccatgactcacctcaaccccaagtcctgcatcctggtgggaagtgacaatgcctcctcccagctctccatacctaatggggtcatgaccagacagggtaggacccaggcccccagcttcagttggtaacggtgcctccacggctgccccctgtccaggtgacaacccagcccccatgatggggcagcaaaggtctcttctcctccttggtcctcagcaacagacagagccctccacaccaggcaggacagaggcaaagtcagaagcagcagcggtggcagggaaggagcagccagcacaggcccagggctctcctgaagtcatttaagctgtctgccatgcggctctgggactggccactaggtgggcgtaggcggctgtgatacaggtacttggacacctttctgtcctgatgctgggggtgagaggggacaggagacagtgagtcatcagaaggacaaagaagccaagggaaacctggggagatggggagaggaccaggaagaaatggggctcctgttggggtacccaggagagtgggctaaggaaggtgggcagagatgaagaaaaatgagtgtgggatttaacaagaggctgatgagggggatggggtggcatncacgccaagagggcccacagaataggaaggactgaagggagggaagcaggtacctagctgatacttgtctttggctgctgcccgctccttggcatcaaaataccagacagtgatggcgtacctggagaccagggtggttggacattagttttctgcaattccagctaccatatccacacacactaggcggccatccttttgagccacccggttctgctcccacctaggccccctctcaatacttcgtcgctccctagtcactctgaggctctgacaggacattgtcacagggggagcacctgggtgcgtctccagaagtacaggtcatacctggtggcataggctggcttcacctcgtgggggttccgccggtcagaccagaaaatgagcaaccggtcaaagagtggctcgatgttggctaccacgggccggccctcagggaagatctgcagcaggccgccatgcacctgggggcaggccaaaggatgaggctagctggtacggccaggagccgctgcctcccacggtgccccgggagcccactaggaggcgcagcgtctgcctgcatcactccctcccacccctcgggctctcaaagtgaatgacaacccagagactgcatcaccatggagatgggcaggaagctactaaagacaggaaaagggggaaagtgttcattacaaggccgggtggggctgggcagacagcaccattcccggaaagaggggagttcccaccacacagtccgctagagaggaggaggtgccatttcccaggaagagccggcagatcgcactgcccgctgtgtgttgagaagagaaacaggagaatgccagaatctgggctgagagtggaaaatggagtggacgcacgccacccccgccccagccctagccccagcgccaccctcaccctcaccctcacccctaccttaacgtcccagttctgattcaggtaatagatacaggtgatgcagcgcccatcgccgtggggattgtcaacgtgccttacgtacccgagcccgttgcctgggtaacacgccaccatggcctggcagggatggagggaggtaggtttactggggctaggcaggcacatcttagagaagcagccatgaattacctattttcccacccctccttgccccatcttccccatgactccttgggtcaagggttccaagctcctgccccaaaagactttctttttcagccaaaatcccatccccaagtctatcagaaacctcagctcctgggcctcaagagcccactccctcccaacacacatacctggggcctggcacccagctagggctcaattagtaacagagtttgatttgtttcaagataccccaaaccccacctcagccatttcagtagaataataccaatttaaacattttcaggtgtgcaaggaggtggcctcacagccctagaccaggaattcttacccttggctgtggagtggagccccctggggagctctgaggttctgaagtacctggcctaaggaagggcctgaaattggtaaagcttcccaggtaattctaccatgcagcaatgttaagaactgctgccctggactacaaagaatccccactaaattatctgtcccatagacctccgaacaggagccaaaagctacagtctgaatagaaagacctaattccaactccaaggataatttgctgggtaaccctagccagttccaacacctgaatgggcctcaactgcctgatgtgtacagcaggggtaataaacactgctgtttacagcggtagcaattaatctctctgagaacataacttgggaggttctggagccccaactcctggagatctaacaggactcattgcagggcttggtttctctgtctacagggttctttcctctgcctgacagttgccactcccctgacccagccctacaatgctgtggccagggccccgggatgtttgtcatcagggagctggcagaaaggtggctgagaggtaaaggaaatggcccagccacttctgcagacacaattccctggttcaagtctcagtgctgccacatgagctgtggcatcaggcaggtgacttcctggtctcaggttcctcatccatggatccaatggagctcacagctatttcacaggttgttgtggaacaagtgaacaagataacaagtgtctgggaagacagccagcacagtgcctgccacatggagaactggagcacaggctgaaatgccatttaaaaattttaaaaggtccctgtcccaccctctgcccaaagtcactgcagtggcaagatgaggtagcacacaaaaaggggaggactggcacaaggacccttcaacttctccccagcccggaccatctgtcttgacctctctgccctgacctctctgccctggtacaactctgctggcgtccattccccacgaatgctcagctacacctatggcccggcccagcaagacagtcccaagataaacattcacgatcaaacatcagtggccactgccacaacaggatgcttgccaagcacgcacgccacagcagactgggctgcttcaatcctcaccctccccaggacgcctcccaacacattatcccagggctcaccctctgtggtggatgttaagctgctctgcattaaccatgtgcacctcatccaccagaccttgccctggaaagagagggctgccaccatctactgccacctagcagtgggaagctgacaaccttctctctggcagcaccagagtacaattagtgagaaggccccccagggaaaaccctaatggctacacttcaaggttcaggagggggcaccttctttgcactgctcactccctatggaagggtcggcactctgagcaaccacctcactgggagaagaattgggccatggtccaggaggcttagaaacagtgagttactgactagagatgggcaagacctccccaattaggaatccaatcagagattacactgatgatgcacgtggatgggtggcagggaaggggtccagtgctgcaccctcttcccacaattcatccccacacagcagccagagcccctcctctccaggtcttcactccatcctgagaaaatacaaattcccaaccacagcctcaaaggcccccaacctcatgtgcctctcccatcactctgctccatgcctcaacaggctgagctcatcgccaccacaaggcctcagcactggcctgggacactcttccttctgaccctctttgttattcaggattcagagaccaagggtcaccttgagtactccggctgattgtccgttccactcctagcaacatggcatcagcacaggcacctgtttacctagtactgccctggaaggcagccacagggaagcccctggggccaggttggtctccccagtgcccagtgcagtacctgcagactgagtgcactgctctgggcctcctctgcaccccagccctgctatgtttcctcctgccctgtacattctcacacagcgcctcccaccaagcacatgggactcacacagaaacaggaacctgctctttagggccccacccttcccccacatatacacaccttgggggtgaaagcatcctctggccccaaggaaagtatctacttcctgccctcacaggggaaggcctcaggaaacttgctctccaagcctcccacctaggggagggacaggtgggaccagggccaggagaccaaagacttaaaggctattggtgacaatctgcctgccaagagccccacccccactacacacacaccccagtcagaagcctgtgactgtcccacctccaagctgctcttcaaggagcaaaccaagcaagctggactctccctggggtcccctctggtagcccttgctgccagtgggagtcaactctctcccacctacaggtcaacggagcacctgtccccaaccagggagttgggggaaggaaggatgacacaggagctccactcagaacgactaagaagcacgtttctactggctctagccacactggtgatccatgtccccacggcaactgctgcagcccacctgagcaccccacagccttactctggagtacaggagagagtccagatggggcccatctaaaagcgggaaagcctggagttgctgtctcactggggaggggagggctcctcccctatgttctcagtccagcctggcctgtccttacttccctaggacaatcaaggtcacctagggctaaaaaagtccaaacacgccccttccccaatcctcgctggggccctgtccccaaccacatagaaggtgggcaccagaggcaccaaaacacaagagatcttctcctactctcccctccccaaactgccagactcactggggatgtaacctggttttcgtattccgtggatcagcaaattgaggctcagagcagtgtcccatctgggccactcagcccttctggtctccccctgacgaggacgacagccaacctggggtgaagatgctgagccagggaggccactgatcccgcccgcacaggagccaagcccagggaggggccggctctggctcagctatcaagtaacgggagggagagggaagtagaacaagttccagctggggtggggaggaaacaggccttggccccgggggagccctggtccctgagccagctccagcctgagaggaaagccacacagaagcagaacccaagatgggatctgcaggaggaggcagaggacatcaggagctcagcctcacgcctgcagggcacaacactgcccgtgccatcagccagccaggcatcactgtgttgagcagtgggcactccccacagggccttgtccaaaggacaccaagccttggactcaaggccaggcccccacaccacccatgaagacaatgatcctgtcagcagcccggaaaggccctatggaccactgtcctgtgctgggctcctgaccccaggttcctgaacaggcagctggaggccatgaggccttgacaactgcccggaaactccaagcaaatgagcatttgtcttaagagaggatctgtggcctctgacagattctcaaaaagacccaggctccaaaataccattaagaactattgttctaaagcaaaaagaaaaagggactaagaacaaacacataaaggcagaggaagagacagacatgggtagggaggaagtgacacacaggacagggggaatggagggcagggactgggacagtgaagggtgggagacatggggatgagctccacctgggcaacaggcagccacccagtaccacccccaggagactgtcctcgatgcagatgccacagtggggacccagggcacaatgcagtccagggccaagcactccgcgcagcgggcagcacccctttccttccctcacgccagggctcactcatcacagccaccctcccccttctgcttctcctgccttggagacaggatggatggactagaaacatgggccagcaaacagggatggacgacaggagcacagggaaggatgtggacagggacagacagcaacagagaacggccaggtgaactgtgtgcctatctacatccccgtgcttggtctggggccacagactgacaccaggaggccatgaaccccaccaaggtccacgctgtgaatgtcagcagctctcatgagtttaagagggttcctggcaaagtcaagaaccactgtggcgatgcttgaaggcagcatgctcgttaagagtcatcaccactccctaatctcaagtacccagggacacaaacacgcagaaggccgcagggtcctctgcctaggaaaaccagagacctctgttcacttgtttatctgctgaccttccctccactattgtcctgtgaccctgccaaatccccctctgcgagaaacacccaagaatgatcaataaaaaaagaaaagaaaaaaaaaaaaaaaaaaaaaagaaccactgtggctccaggacaaactcctagcttatcaggtgcacacattaaggcccgtagggaggataaagacccccccaagtccccacaagtaagcatacccactccactgaactgcctaaaccttctgtgacctcccagaagcctgtctccaaacccactgtgctcagagcactgaatgctgcaaaccagggtgctgcaaagcccctccaaagaggcccccacctagccttaccttggtgcgcccgttgatgacatagctgcccagccgccctgcgcagtggcggatgacggcgtccacatgggccatgagggcaccaatgcttcgacagcctggttcatggccttccacccaggcaatctggtccccacggatgctgcgcggtgggatcgccctctggctcactagctgcccgtctcgcaggcgcccaccccgtttgagggcctccacctcggccagcacgcgaccgcccagtgctgcccccaggaagctgtccttgacgcagatgccgtagtaccgcatgcagggcacgatatagtccagggccaggcgctcgggcagtacgggcagcgctcctccatcagcccagcactggcctcaccactgccactgctgcagctgcagctcatgccaccctcccgctctgcctcctggttctcttgcctggcccagggcgtattgctgggtgaaggggcatccccaccatcctcggcccatttccgtttgggggcctcaggcgtgcgccctgggctgccaatcgctggcaccccttggtgaccagcgctgcagcgccttcactctgcagcggccgcagctcaccaccatcctgcccgccaaaaccgtcccgaagagggctggcagtggtagaggtggctgtggctctgggggtcccactccctgccgaggcctcactaggcactcctggacagtggtaggaggggagcaggggacagggcaggtaactctccactcccatcctggcccggccaggctcaggctccaagggctctgacgaagaccctggtaactgagggagagcctgacttaggggctgcggctggcacgggctgtccatggcagcagtgtcttcactcccccgggcatggagggcaccgcccggcccatggtgccaccctcctccgcctcctcctccgcctccacttgatacagctgggggccaccgggcctggcgtggggcagggtgaggcagggcagacagcaagagctcttctcgtgccctgggggttgcttgctggtccccaagtcctctgcggtccctaagggcttgggaagggacccttcagggtggctagagaaaagaaaaaaaaaaagggatgtgagagaaactagagacaggcaggcaggggaaagc

SEQ ID NO: 911 - DNA, 1001 bp, Homo sapiens
attgcttcggcctggccgggagagcggaagggcctggtgtgggagagtcccttgcactgccaagacggggccactggaaggtatttgggtggaagaaagccagtaagcccatggggctggctgggggcaggaccacgcgttatgaccaccgtcctgttcctacccccaggagccccgtttgaccccgtgcggctactggataatgctgtatccaatgttatctgttcttgtcttcgggaaccgctatcgctatggggacccggagttcctgaggctcctgaacctcttcagtgacaacttctgcatcattagttccagatggggcgaggtgagagggccggccacaatctttccttggtgcgtccagccttatgccaaatcccgagtacacagacctacctacaatggatcattagaatgggacagattcctggaagagttctagaacatccagtatcaaagtcctagtccaatctccctgtagggaaactaaggcctagtggccttgtgcagggcccatgttgagacagaccctgtctctccagatgtacatttgcctgtccctcatggactggctcccgggcccgcaccaccgaatcttccgaaacttttcggagctgcgggtcatctctgagcaaattcaacgacactggcagatgcggcagccagcggagccccgcgatttcattgattgcttgaccagatgggtaaggcatgggtcccagctctctaaactctatccatgccgcccaccaacaggtgcctggcacgcggcagcacatctcctctgcccacagtaacagcaggacccggagagccatttccaggagtagacgtcggtaatgacgacgcattttttttttggcgtcaccgaaaccacgagcaccaccctgtgctatgggctcctcattctgcttaagtacctagaggtggcaggtgtgcaacccggagagacccagaatgggaggctgcagtctggggatggctggagggtcctggaa

SEQ ID NO: 912 - DNA, 832 bp, Homo sapiens
aggagccccgtttgaccccgtgcggctactggataatgctgtatccaatgttatctgttcttgtcttcgggacaaccatcgctatggggacccggagttcctgaggctcctgaacctcttcagtgacaacttctgcatcattagttccagatggggcgaggtgagagggccggccacaatctttccttggtgcgtccagccttatgccaaatcccgagtacacagacctacctacaatggatcattagaatgggacagattcctggaagagttctagaacatccagtatcaaagtcctagtccaatctccctgtagggaaactaaggcctagtggccttgtgcagggcccatgttgagacagaccctgtctctccagatgtacatttgcctgtccctcatggactggctcccgggcccgcaccaccgaatcttccgaaacttttcggagctgcgggtcatctctgagcaaattcaacgacactggcagatgcggcagcagcggagccccgcgatttcattgattgcttgaccagatgggtaaggcatgggtcccagctctctaaactctatccatgccgcccaccaacaggtgcctggcacgcggcagcacatctcctctgcccacagtaacagcaggacccggagagccatttccaggagtagacgtcggtaatgacgacgcattttttttttggcgtcaccgaaaccacgagcaccaccctgtgctatgggctcctcattctgcttaagtacctagaggtggcaggtgtgcaacccggagagacccagaatgggaggctgcagtctggggatggctggagggtcctggaa

SEQ ID NO: 913 - DNA, 541 bp, Homo sapiens
ctttagcgtaagcaaacggcagtttagcaacggaagtcagagaggctactgcacctttctggtcacgaccgtgcatcgggttagcacccggtccgaacggcgcgccagcacgacgaccgtctggggtgttacccgttttcttaccatacacaacgttagaagtgatggtcagaacagactgagtcgggatagcgtcacggtaggtgtgcagtttctgaattttcttcatgaaacgttctaccaggtcaacagccaggtcatctacacgcggatcattgttaccaaactgcgggtattcgccttcgatttcgaagtcgatagccagaccgtcttcgtcacgaatcggtttaactttcgcatatttgattgcagacagggagtcagcagcaacggacagaccagcgataccacacgccatggtgcggataacgtcacggtcgtgcagcgccatcagagaggcttcgtagctgtacttgtcgtgcatgtagtggatgatgttcagtgcagtgatgtactgtttaaccagccagtccatgaaggg

SEQ ID NO: 914 - DNA, 465 bp, Homo sapiens
gtgaaagcagaaatgcaaaagcacggagaagaccccttctgccctttctccatcatcagcaatgccgtctctaacatcatttgctccttgtgctttggccagcgctttgattacactaatagtgagttcaagaaaatgcttggttttatgtcacgaggcctagaaatctgtctgaacagtcaagtcctcctggtcaacatatgcccttggctttattaccttccctttggaccatttaaggaattaagacaaattgaaaaggatataaccagtttccttaaaaaaatcatcaaagaccatcaagagtctctggatagagagaaccctcaggacttcatagacatgtaccttctccacatggaagaggagaggaaaaataatagtaacagcagttttgatgaagagtacttattttatatcattggggatctctttattgctgggactgataccacaactaactct

SEQ ID NO: 915 - DNA, 454 bp, Homo sapiens
atgtttacattgaaagacattttcaagggacattaaagaatatgagaaaatttaaccatggagcagggtctttatttcatttgcagctgtatctactgcaccccatgcctggcaaatagtaagaattcagaagtaatgtgggaaggaaggaagctagccaaaatgatagagtacaccatggaaaataggatgaaataggtgacagtaaacaaggaatatttgagaacaatttgatacaacatctgggagcaattttgtggggtttgatggtgggatgtataagtgaaaatcaaataggatgtagttgtggatgaccttaacaagttcatatgttttaaaatcagggctgctgccgacaacagacattttagattacctgccagttatcagattccaaattttgatgtccagtagttctaatctagttgggctattcatttagtcagctaatatt

SEQ ID NO: 916 - DNA, 6573 bp, Homo sapiens
gtgacaatggttctaaaatccaaaactttgtattagaatgggatgaagtaagtaaattgaatctttttaaatggttaacattatgtgcatatgttcaggcaaaattaacttttttgtttgttttaatcatcaagtatattcttctgtcaaaaaaagtatgaatgattttgtgtggtgcatgagtggattgatggtgttttcagaaaacattcctgacttaacttccctattttcaataaatcaccatcaaaattattatttaggtaactaccttgataaaggaacttttttttcacatcagccttaaagacaagtgtattcctttcctatggctgctataacaaattaccccaaacctgacattaaaacagcacattattctcttacttttctggaggccagaaatccaaaatgagtttctctgggacaaaatcaaggtgtcagcatggccaggccctctccagggactttagaggagaatctgtttccttgccttgaccagcttctgtaggctgtcctcattacttggttcatggccacatcacattgcgttttctccccttgtttccatcatcacatcaccttcctcctctgtcttcaaatctgtcttccttttttaggaacacttatgattccatgtagggtctattcagataatccaggataagctcctatctcgagattcttagtcacattgtacagtcccacctaccatataaggttatattcacaggttcaggggattgggacctggatattcatggtggccatgactcagccaaccacagcaagcatactggacttcattgtttagtacaggggtgtccagtcttttggcttccttgggccacacaaaatactacatttgtgcaaaggtagttgctgtttttgccattaaaagtaatggtaaaaacagcagttacttttgcaccaacctacattaacactaacaatagctaatgagcttttaaaaaaatgacaaaaatatctcataatgttttaagaaagttaacaaatttatgttgggccacattcaaagctgtcctgggccgcatgtggcccttgggccgcaggttggacaagcttggtttagtacattgtttttactatcagttaccatgttctctcttgccctatggcttgtaccaagctaagaagaggggccagagggagtggaagaaattccattgataagttgggaattcggcagtatattaaaagaataataaagcacaaccaagtagattttattccggaaattctaagataatttagaattaggaaacctattaacatatcacattaatttagaagaaaactatattgctaaattaaggaagagtatttgataaaaattaccattcatctcagttaaaactcaaagcagattaggaatagaaaggtaatttcttacttgatagttatttttgtaccatcactaaacaaaggcatttttatgcaaagctgaaataagtcaagattgccaattatccctacctttatttaacattatttcagaagttacacttaaggcagtatgacttgaaaccaaagcaaaaagtacagtcatggtgtctggctcggggcaaaactgtcattatttagagatgatatgattttctacttagaaactcagtcgaatcaactaaacaacatcagaactaaaaagagcatttagtaaagcagtcaagtacagtctacaggttttctttgaagcagaagtcaccctaactaccattttatctctagcaacacaataaagaaaaatgggtggcaaatgtgaaacttacccattttagttaccactctaaatttctaaaactctttagttgtcctcttttctctctccttcttattgcctgtaattgggctgtgctctctgctagaacattttcagtgttaatctaagcagtagaagcgccaaaagttttattttaaagaagtttatgagctatctagttggaagtttgggcatgggtaaggaccttttcttaaaactgtctgcttagagctttccataggttgaaaaaagccgccagttgaccctatcaaagatcgtcaccccatttctaccactggtagtcttctatggagattgtagggtccatacctgcagagtttcctttattaaagccagagatttaacattggctaaaagatggtacttaattcaagaagctgtacaaagatacctgctctctggtgttttaattctgcatttgatgatctatatcatataaaagatgtgctgtatctcagccttctcttgagatccatgacttttagtatacacttgctaatatgtaactgtcaagaaggaattgatgcgaatttatctttttacagtaatgtacatggtatataataatcagccatttcttgtagggaaaaggaaatggagaattttgtcagtgttacatgggctcacagaaacaatttaaaattactaaactttcaccagcaatgggctgtaaattcagactatcggccagaaatgactatggtacaaggtaaggtgtactttataaaagaatgtaaatatttttagattatcaagtcaacgtcaattgtataattatttactgtccaaattattcattaaaaattctgcttagtttatctctttgttgatatagttaagatgtgttaccagtctagcaaaagctataagagagttagttacataggaaccacaggaaacattaaacttacaactttccaagattttcagatataaattagatttttatatgtgacaaagagatttttcttttgctcctcagcatatgtgatgacagtattttgtttaaagtcaggtgaactgtaagaacatctaaaatacccaatttaaatagaaaggccaagtatctttcaagagtcattgaaattatttttgttctagagatagctctgctcaccttaggggcaggtgcgtttaattacacaactgagaacttacattttctattttatataaatggcattatatgaaagtgtgtttaaaagttacaacatttacaccaatacacgagtgttattgtttccataaggtaatgtgtatattttttcattgactcgataaattatgatataaaggcttacaaatctgaacaaaactgcatttttaatagaacactaattcactgtttggtatctgacctggttatcataaagagatcaaacccaagatatattatttgtattataattcattatcaaaacttgtcattttccaaaaaaattacatctgtcacaaacttgttctttcactgtaaaaataactttttcatgccttttaaaaccatttgtttcaacagtggttttagtgaagaagtcttatattacacctcaggctgtgctccttctatgccagcaagtcctgtattaaccaaggctggaattacttggttatccttacaatggagtaagccctcaggaacaccatcagatgaaggaatttcttacattttagagatggaggaagaaacttcagtaagtgcaaatatggattttaaatagtgtatttaaaacattttcagcttaaggagattttgggctgagacgatggcattttctaaatatacaatcatgtcatctgcaaatagagacaatttgacttcctctcttcctatttgaatacgctttatttctttctcttgcctgattgccctggccagaacttccagtactatgttgaataggagacgagggcatccttatcttgtgccagttttcaaagagaatgcttccagcttttgcacattcagtatattggctgtgggtttgtcataaacagctcttattattttgagatacattccatcagtacctagtttattgagagtttttggcatgaaggggtattgaattttatcaaaggccttttctgcatctatcgagataatcatgtggtttttgtcattggttctgtttatgtgatggattacgtttattgatttgcatatgctgaaccagccttgcattcctagggatgaagccaacttgatcatggtttttcgatgtgctgctggattcaatttgccagtattttattgaggatttttgcatcaatgttcatcaggcatattggcctgaaattttcattttttgttgtgactctgccaggttttggtatcaggatgatgctggcctcataaaatgagttagggaggagtccgtctttttctattgtttgtaatagtttcagaaggaatggtaccagctcctctttgtacctctggtagaatttagatgtgaatccatctggtcctgggctttttttggttggtaggctatgctggaaaccattattctcagcaaactaacacaggaacagagaaccaaacactgcatgttctcactcacaagtgggaactgaacaatgagaacacctggacacagggaggggaacatcacacagcagtgcctgttggagggtggggggttaagggagggatagcattaggagaaatacctaatgtagatgatgggttgatgggtgcagcaaaccaccatggcacatgtatacctatgtaacaaacctgcatgttctgcacatgtatctcagaacttaaagtataattttttaaaaaatcagaaaaaaaaacattttagtgtggcattaatcctaatacaataaatattgccactcctaatacagtaagtattgccacagtagttagctcatttcccagtcctttgaagccttggcttgttactgtttgggagaggttaggtatgatggagaactcagtctttttttttcttttgcaacagggtcttgctctgtagcccaggctggagtgcagtggcacaatctcagttcacttcagccttgaactcctgggctcaggcaatcctttcacctcagcctttcaagtagctgggactacaggcacatgccaccatgcctggctaattttattttttgtagtgacagagtttcgctatgttgcctaggctggtctcacactcctaggctcaagtggtcctcccacctcagcctcccaaagtgctgagattacagacttgagccactgtgcccagcctgaaaactctgtcttttcttttgatgtgaagggggttttgttttatttgtgtgtgtgtatatatgtctgtctgtgctttggaaccacataggctgcactttaactatatctgttttagggaaactatgaggaggggaagatcaccacagccttcttgactaagcagctctaaaagatgaggaaatattgggtctgcctttctctaactgtatttatacactgcttcccaaggtgtcacagaagattttaaaagtttcctgtgaaactgtagtacagcctgaatctagttacacatcactgacatcctattacctagaggctagctgaccaggagttagggtgtattctattattaaatctatatatagttcatagattttcagagctactttgaaggaatatgggtcaaaaatggcattggtccacccctaagtatatacccaaaagaattgaaaacacatgttcatacaaaaaaattgtacacaaatgttcatagcagcattattcataatagtcaaaaagtggaagcaacccaaatgtccatcaacagatagatggataaacaaaatgtggtgtatccatacaatggaatatttttcagccataaaaagagtaccagtatatgccacaaccttgaaaccaaccttgatgacctatatgaaccaaccttgaaaacattatgctaaagaacccagttacaaaagactccatattatatgattccatttatatggatatagacaaatccatagagacaggaagtatgttagtagataggtggagggaagtgactgctacccaaaaaaggacaggctttttctgaaattaggaattaggggaaagttgcacaactttgtgaatacactataagccattagattttatactttgaaatggtgaattttacagtatatgaattatatctcaatttttttaattcaaaaaatgataacgttcggaaaatttgtaaagcattgtcactagtgctggaaatagccatcccaaacctaagtgacatcctcacctgccagcacaattaacccttcaattatttacttagacaaccatgtgttaaaggcaagttaaatatgttaactacttacagttctattcagctcttgcacgatgtctctgggaaatctctgttcttgggatagcttactgatggtgaagttaccattggctccaactctataaactcttccctcaacacaaagatcgtcttctcttggctactatatttactgagactaagtggcctgcttcatcttctaccaaatgttcaataagcatttccgggtctacccactgaagacagaagcatcgaggtgaggattccactcaacagagcattagtcatattgcacatagtagaagatgaagagaaacccgggtcttttcacatattcattattgcccatatttctattgttagacatcgaatgaagactttgttttttccttttccagggatatggttttaagcctaaatatgatggagaagatcttgcttacacagtgaaaa

SEQ ID NO: 917 - DNA, 539 bp, Homo sapiens
ggttttactgctcctgagcaccctcccaatggacacagctaggaactatatgtgtgtatatgtttagtttatatacagatatttatacatgtgtatatacataaatagacaattacaacacagatacatatctgtgtctctgtatctctgtatttttaaaaatcatgagttcacaccagataccttcaattctaatccagtgccacaggttaattttagttttcccctgtccttatttctaacttccttcatcatcagtgagaaactttgctcattagttgataaattcaacatttaaattttcctgccagtgcttatttaatcaaaccatttcaaataaatgataaaagccactgtaaattgttttcactattaaaaagcaaagaaattttattacttcttgagaatcttaagtctttagcaatgggaaatttgattatttagcacataataattgttatgctttattttatgctattagcttcattttaaaaacttataataatgctatgtcaatttaatttctaaatatgattttc

SEQ ID NO: 918 - DNA, 510 bp, Homo sapiens
atgactttgtgatctgggatgatttatttggttctttgaagccctcattttctcttttgtaaagttcaggtaatagtacttcatagagttgattggaggactaaatgagataaggtaaaacactttacacttaatagtatcccctcaaacttggagaaaagctagaggatcagtcttaggttaaggtggacattttaatagcctcactggaaaaagagaaaaattaatcaagtaagtgtgagagacctcagcaactagactagagcaatctggagtcattaacacttggaaaatgtctttttatatccctcacttcctgctgagacttttgatctctctctttggattctcttcctctatatcataagagctggagtttcccaaagattcttcctctgccccgttcacattatattcatttttaactgccactactttgccagtcagtgagatattaccctaacttacaagcaaattctggccatgctaaccagtttaaaattataattt

SEQ ID NO: 919 - DNA, 2633 bp, Homo sapiens
gagagacgaccctggagccagtccccagagcagcagccagccagaccacggccgcctctcccgtaagccgctagcagcagggacggacgcgcagtcaggactggaactgcctcagaggcctgttcccatggctgaatggggtcttgcttctgtaggtccagggtttttatgacatctcccagttaaccacaatgaggaaatgtagtttggagctttttaaataaaaggctggcattgatgctgggattgctcactgggtgcatccagagagcagcagaggccagagctgtggtccttgggcctccacactctggctttgcagaaggatagcataaggggtcttagctcaaagcccaggcagccgtggggaggtctgatgtgaacaccagtgggtggagggctgtggggaggagcgggcccgtcaggagcaggccaggcccagtgggcatacagcgtcatctcaccctgcttccttcctcacgtcatctcaccctgcttccttcctcactggatacggtctttcccagccccagaagctcccgacaggcccaccatctccacggcctccgagacctcagtgtacgtgacctggattccccgtgggaatggtgggttcccaatccagtccttccgtgtggagtacaagaagctaaagaaagtgggagactggattctggccaccagcgccatccccccgtcacggctgtccgtggagatcacgggcctagagaaaggtaggggcctggccacaccgtggccttggcctgatcccccagctgcccctttccgcctggaggaggatgacgagcctgggatccccttctctcggcccaggcccccacccaccagcatgcctccatgttgctgtctgtggtgtttaccacagtcctaaagccttctgcctccctccagaagagcatccagagccatctcccctgcagctcagctctgacagtggcgggtgttcttgtgaggcctttgagaacttgctttggggaagggctgcccagaagacccctccaggtcctgggccttgaaaggccatgggagaatcagaaggtatttcccagctcctgagttcagtgagtgtccctctcaccaggcacctcctacaagtttcgagtccgggctctgaacatgctgggggagagcgagcccagcgccccctctcggccctacgtggtgtcgggctacagcggtcgcgtgtacgagaggcccgtggcaggtccttatatcaccttcacggatgcggtcaatgagaccaccatcatgctcaagtggatggtaagcgggcctggccgtggactgcagtggaagacggcctcccctaaatgcccttccctgtgagcctggggattagactcccccgaacagggcacctgaaagcttcatcagtggaatttgggaggctcttagtggctggagctgctctagtggtctcctgttgattctggtgccttgacctggtagacctcaccctccttcctgcccttcccctgacaccacaggggatcccaacacaactgttcagggccccttctcagccacaggggcccctcacatgtccagggagatcagaagcaattgaagtctttggagaaatggcaatttgtttcttctcttcaaaagcttagggacctctaggctaaataaaataatgagtaatctttacaacatttttcagagaacctcagggatatcattagaaatctttgccaggggtcccaagtgaaattcaaactctggactggggtagaaccttcatacaccagtggttttgctttgatgatgttttctctgcccattgtcaacttgtttcttctccattccctatagtacatcccagcaagtaacaacaacaccccaatccatggcttttatatctattatcgacccacagacagtgacaatgatagtgactacaagaaggatatggtggaaggtgagacacagttctgtgtttatagcttctgcgtgatatagtttcctccgctggcatgggggacaaggtattggtgaaatctggtgaagcataaacctgcgtctggtgtgacacgaagctctaagctccgtgtcattgactcattcataatacccttgaagctgtcaacttcatgaacccatgtgatgatgggacaacctgggtggacacctagaacatttcctccagcgttcctccacacgccgcccctgtgccagtcagtggcatcctcccccacacactgccccagctgagtctgactatgagattgggatcaagaaaaccatatacacattgccatgcaccattctctgactctgtttcccaggggacaagtactggcactccatcagccacctgcagccagagacctcctacgacattaagatgcagtgcttcaatgaaggaggggagagcgagttcagcaacgtgatgatctgtgagaccaaaggtgaagctctttgggttctctctcctgtcttggtgtttccagcgagggaaggcagagtcaccattccctgtgcctgtgcggtgctgggcctctttcccaggaagactctttgttttccaaataccctcagacttggtcatgtttcactctctactcatttgtctgtgcctaatactaaatagaccatgatgacaccttcaa

SEQ ID NO: 920 - DNA, 13795 bp, Homo sapiens
ccccgcacctccaagacagactcatatgaactggtgtggcggcctcggcatgagggcagtggccgggcgccaatcctctactatgtggtgaaacaccgcaaggtatggccctggtgtggggctgctgcctcccctgcacagcctttccagcaaggctgagcagagtcactgtctcttggccatctccccttgagctcctgaagcctgagccggtaatccccaccactaaacaggcccttctgtctcctccagtgtccatccctgccacctcccaggaagctggttgtaagatgggtgtgtgggaccctggaaggcccaggaaaaagccttgtgcgtgcatccagtactaagctctatgcactcaattcccagaagctcacactggcttctagtccctgaggagaccgtgaacagtctccctggtaaccatcaccctccttcttgctttcctctgtcgttagttgttgatgttacattttggttttttatgaaagtaagccgtgctgggtacatacctgcaggaaccctggcatggtaagccagctgtaatgccaggaaaacaaatatttgtgaacaagtgttttctctgtaggctgtgaaacacccgctcagttctcagaatctgtcatggcttgggttggacaagcaggcatttgagctcaaagcacatcatgttgttcagacctcagctgtttctccttgacagaaggaagtctgtccaggtgaatgcttcaggagctgtcagggagggagtctcgggctctgacaggatgcgggggcagagcccagccaggcctatgctcctggacactgtgtcctgtgaggcagggcagggtccccaggccgccactctcgctcaaggccgtgctcttacctgccgttaccccacagggatgaggacatgaaattccctgtaagaaaatgtccttgaaaatgtttttgttcactccaagtatatgccattttctttctaaggccatttgatagtagaaaactattattcttaaatggttttttaaaaattgtatgtgataaaagcatatacatgctgattttgcttataaaaatgctatgtgcacttgatggaaagcatatgaatgtggaattaaaagtctttctccactcctccccacctccacaaacaagcaagaaaacagaaccaaccctgcacagtggagagcgctagctgtgcggaagctgtttccctgccttggagccctggcccctgactccttctattctgtttttttccccttacatgctctcctagaagtccttgggtcaggacaagtccacagagaccctggggttgtcagaaagacacctaaggcagagcaccccctatgctccctctgctgcctccccagaggcagggggacggggcgagcagtttctcattagccctccacctgctggcctcttcataggcagccagcaaagcgggtgaatgagtttttaacaaaaagcagcattgttcacatgttgtagggcagggctggtcctaatcctatttccccatgtaactggacacctccatctcagagttgtagacaaagatcagggcaggccaaacgcccatggttcccaggagacaaaacccagcatgagagcaagactaatatttttcaggccaataggtggccgtgaagcagcctcgcagaagaggcagattggcaaaggccatgccgtggtgatccggaaatgccaggctcaggccgcattcaccccctcagtgtgtgtgacagtgactaattacccttctatttcttattttcatttctgggcccagtggaagtgtgaggccagtgctgggagggcagggtacatggggcgcaggggaagtgagagtccggacaggcccctgctgcgtctggcttctctcaggctccagcctggggtctcctcagcctggggttgccaaggcagaagttctggcttgaaagcagttcctctcttacggaactaacaagtcttaaagatcacccgagaaagaatttgaaatcgaaagtcagcattcgggctgtgttttttcatcccccttctcttgctggggattgggaatcattcagctaattttcactgtttcacatccatgaagcaagtttcatttcctggtgcatctgcagaccctgggctactgtgtttgggtttccagcaccactggggagtctcagtttgtaaaaacgtctccccttggaacaaatcctggaagcctgacaatgagcccagaccattcctgtgccttgaatggtaggttttgttcgactttggaatattctgctcagagagaagagcttttccttacagctgttttcttccttcagcaaaccacaacttgaggctccagcaggttctctggggtgtagagttggcagtaaagtctgttgtcccgaaaggtggcgcggcaaagatgagcagcctctcagcatcacctgttggggagcctggagctcccttactttttcctttaaagagctaggaatttgaagctattaaagattaatccatcacagtcacaattcatccacagtttttaagttctgagcaaggactgaaggcaggagcggaaacaaagaggattgaaatgatagaaactgcactgggctgaggatgtggagaggggtctagagaggccaggcatttgctgggcatctactgtgcaccaagctcactgtggggcactttatacaacttctctcatttaatcttcagaataacctgagagagtttatttgcctcattggtgaaatgcagagctgaagggtcagagagttaggggacttgctctgagttacacaaccgggatttgaacccaggactttggatcccagactcttcttcccaggatagggtgcaatgatgggcatgctctttggagtcaagtcaccgttttggtgctcactagccgtgtggccttgagcaaattgctcatttctctaaaccttagtctccctatttgtgaagtggaaacaatattaacaccaatcttttgggctattttgaggaaaaggaagtagcacctataaactgcttagttccatgcatagcacagagcaagtgcttagcgaatgttgctattttaatgggtgctgatactttcgttacctttctcatcattgtgtctcattagaatataagcagagggaactgcatttggtttacatacagaaggagaaagaaaacaaaacatggagattctttgaaatacagggagagaaggtctttggaggagttctcagcaatatcagtcaggctgtctgacttcccccactgaggtttctttgatgagatcattagacgagggatcagggagcctgacttgaatgtcccagtgaggttggtgtcccatagccaggggggccagtccgaggctgtgccaccctaaccccaacctggcttatcgtccttccccttctcctgccctcttgggctcagcgctgctttctttgtaaaccatagcccactcgtagcccgaggctgagatgccggtctttataccagctaccttctccagcaggtcacaaattcctctgacgattggaccatctctggcattccagccaaccagcaccgcctgaccctcaccagacttgaccccgggagcttgtatgaagtggagatggcagcttacaactgtgcgggagagggccagacagccatggtcaccttccgaactggtgagagtcaaacattgccccttgcttagggtttccgtgggtctaagcaagttccactggcccaggtgagaattcctgctcaccttgccccagctgttcaccttgaacttcatctttccttccagctactgcctccttgtggtttgtgtgctaggctgaggtcccagctctcatcaggagagtagccagccggcctctctggcaccccttcatccctctctcacacaggggccagcaatagtaccacaacagaaccagtctcggccgaggctgagcccacaccctcagtgccccggatgcttatttgcatcactttgtcatgccgcttagcagagtctcaggcaaaaaggactctgtgggagggagatctcatgcctgcttcctcccttgctgactacaacccatttccacccaggacggcggcccaaacccgagatcatggccagcaaagagcagcagatccagagagacgaccctggagccagtccccagagcagcagccagccagaccacggccgcctctcccgtaagccgctagcagcagggacggacgcgcagtcaggactggaactgcctcagaggcctgttcccatggctgaatggggtcttgcttctgtaggtccagggtttttatgacatctcccagttaaccacaatgaggaaatgtagtttggagctttttaaataaaaggctggcattgatgctgggattgctcactgggtgcatccagagagcagcagagggccagagctgtggtccttgggcctccacactctggctttgcagaaggatagcataaggggtcttagctcaaagcccaggcagccgtggggaggtctgatgtgaacaccagtgggtggagggctgtggggaggagcgggcccgtcaggagcaggccaggcccagtgggcatacagcgtcatctcaccctgcttccttcctcacgtcatctcaccctgcttccttcctcactggatacggtctttcccagccccagaagctcccgacaggcccaccatctccacggcctccgagacctcagtgtacgtgacctggattccccgtgggaatggtgggttcccaatccagtccttccgtgtggagtacaagaagctaaagaaagtgggagactggattctggccaccagcgccatccccccatcgcggctgtccgtggagatcacgggcctagagaaaggtaggggcctggccacaccgtggccttggcctgatcccccagctgcccctttccgcctggaggaggatgacgagcctgggatccccttctctcggcccaggcccccacccaccagcatgcctccatgttgctgtctgtggtgtttaccacagtcctaaagccttctgcctccctccagaagagcatccagagccatctcccctgcagctcagctctgacagtggcgggtgttcttgtgaggcctttgagaacttgctttggggaagggctgcccagaagacccctccaggtcctgggccttgaaaggccatgggagaatcagaaggtatttcccagctcctgagttcagtgagtgtccctctcaccaggcacctcctacaagtttcgagtccgggctctgaacatgctgggggagagcgagcccagcgccccctctcggccctacgtggtgtcgggctacagcggtcgcgtgtacgagaggcccgtggcaggtccttatatcaccttcacggatgcggtcaatgagaccaccatcatgctcaagtggatggtaagcgggcctggccgtggactgcagtggaagacggcctcccctaaatgcccttccctgtgagcctggggattagactcccccgaacagggcacctgaaagcttcatcagtggaatttgggaggctcttagtggctggagctgctctagtggtctcctgttgattctggtgccttgacctggtagacctcaccctccttcctgcccttcccctgacaccacaggggatcccaacacaactgttcagggccccttctcagccacaggggcccctcacatgtccagggagatcagaagcaattgaagtctttggagaaatggcaatttgtttcttctcttcaaaagcttagggacctctaggctaaataaaataatgagtaatctttacaacatttttcagagaacctcagggatatcattagaaatctttgccaggggtcccaagtgaaattcaaactctggactggggtagaaccttcatacaccagtggttttgctttgatgatgttttctctgcccattgtcaacttgtttcttctccattccctatagtacatcccagcaagtaacaacaacaccccaatccatggcttttatatctattatcgacccacagacagtgacaatgatagtgactacaagaaggatatggtggaaggtgagacacagttctgtgtttatagcttctgcgtgatatagtttcctccgctggcatgggggacaaggtattggtgaaatctggtgaagcataaacctgcatctggtgtgacacgaagctctaagctccgtgtcattgactcattcataatacccttgaagctgtcaacttcatgaacccatgtgatgatgggacaacctgggtggacacctagaacatttcctccagcgttcctccacacgccgcccctgtgccagtcagtggcatcctcccccacacactgccccagctgagtctgactatgagattgggatcaagaaaaccatatacacattgccatgcaccattctctgactctgtttcccaggggacaagtactggcactccatcagccacctgcagccagagacctcctacgacattaagatgcagtgcttcaatgaaggaggggagagcgagttcagcaacgtgatgatctgtgagaccaaaggtgaagctctttgggttctctctcctgtcttggtgtttccagcgagggaaggcagagtcaccattccctgtgcctgtgcggtgctgggcctctttcccaggaagactctttgttttccaaataccctcagacttggtcatgtttcactctctactcatttgtctgtgcctaatactaaatagaccatgatgacaccttcaaggaacttgataattaactcatccatgaaatcaggggatagacctcattcttaagttgggaacttcctataaatactttattcctgcaatgatatttggtgcttacatgggttggtttatttaactgaactacaatcccatgagatgggaaaggaagtgggcatgaggaagctgtatactgcagccaaggccatgcagccggttaggggtagagcatgctttgggccaggattgtcttaactacaagaccagcccctttctgttgcacttaaaacatgttaaacatagtcacataataacttgttaatatttgcacattggtcagatggggagatagcattatctccgttttgcagatactgaaagtgagataaagcagttgtattgcaaagaacataatcaggagaagatcacaaaggaataggaatagagacagaacaacacatttttctctcatcaaggcaatggcattctctctcctgcttcactggctttcagttgttcagcagatcctccctgagtgcctctgtgtctctccctgccctcttccatcatgcacaccagagggagggcagatacatgcacagcccagaatcctggatcacctggtgcagggagtgcccagagggaggaagagacttcataaagccttcacactggtcttctggaaggaccgagtcttaggctaggatgaggagggagtggcctggaggacaaggctggacatagctccagatggttggggtgtcaggcaccgggaaggaggttatgggagtgaatgcctaggaaagaggccactgaggatggtgtgagatgagccggtgcagccagggagagctggagccactggaggctgtgaggtggaggagggctgtcagtggatttgtctgctgagatgggtcactggtgactgtgcagggaatgggctgagggttgagaactggggctctaaagtaaaggtaaagagaagggatgggtttgagtctcttttctaaggaggtgtgggcgggaccagggtcagcttgcatgctagggctgggagagagtgaaagaagttaaaaataaacttcaaggtttccagctggaagtactgcacaggtgatgttgccacttattgaaatggcaacggcaagaagacagatttcatgagaaaggaacaaggtaaaaccacttggaggcttactgagtctttgactctttggagacattgaaatgaagtgtcttgataaggagcagagctcctgccccgtgcagggggtccgggtggggagattggtttgcggctctttaggatataggtagaagtcacgggactaggtgagaatatacagagagtacagacgggaggaaccaggaaggcctcccagtgtctgtggaggcagacggcacagagaggaaaggagaggcatacagagcagcagagaggtgggggacattaggggacagagtccgaaagccgggggagaagatggccacgagggccagcagggtcagatgcacctcctaacagcaaagctaaagtgaggagctgatggccttgactccacctctgaattggcatctcacatgtactgtgtgtcctcgtgagtccgggaacacctgtccccctgctgtgatccatgctaatacctagtgcttcacgtctcagtccaccagcaggtagcacgctcttgggtgtcggtaaattcttccattcccaattctttttctggctcctgcattttaaatattttcttccaaaagttcaccagttcttcccaaaagcactacaccgcttctgccggaaggacccagtccaactctagtgcatggctcacagacatctcgctctgctttgaaatataaggctcaggtctccgccacaacaccagatttcacattagattccaatttcatgctgagtgtggacaccattcaaataagagattttgaggcccaatctagtgagtctgaccccatttcccaaacccatggaatgggggtatttttttttctatttgttgtgaaggaaatatcaaagaaacatatgctgaagtgagttttgtccacaattacagctcggaagtcttctggccagcctggtcgactgccacccccaactctggccccaccacagccgccccttcctgaaaccatagagcggccggtgggcactggggccatggtggctcgctccagcgacctgccctatctgattgtcggggtcgtcctgggctccatcgttctcatcatcgtcaccttcatccccttctgcttgtggagggcctggtctaagcaaagtgagtgagtgacgctttcagtgggaggatcctgggtgggaaatgggggctccactaaggaggcctctgcctaggtctgtgtccatggaaagctcaagcccaagtcccccaaaggtctcggaggtcagagaacacccaacgactgggcccctcccccagctcacagacctcggcttggggaggaggaaggagggaaagttgggctgtcttctctgcacctttggagctcgggacctatgttgtgccatcttctgaagtgtccgaagctgctcctctgacctcacattcctacttacagtccatcctgcctcttccctgggtgcggagctgccttcagctttcccctctatcctggaatctgacttttagtcactaatttctgcttcagatggcaaaacatctggtcagcttacctcctctaaatattgttcttcttttcactcaccgcctcctgcccccaagccctggaccctgtatctccccacccttctccctgcagaagagtctaggtgtcaggtagaaatgggcgacacaaaggagactctaggagaaaatgttctccatcgcttgggcactgtcaactccctgcctacgtccttcaaccctctgtggccaggagcctcctgagatccttgtggggcttttccaacccatcccgggctaccttggcctaagcacacctttatttttctgtccttccagaacatacaacagacctgggttttcctcgaagtgcccttccaccctcctgcccgtatactatggtgccattgggaggactcccaggccaccaggccagtggacagccctacctcagtggcatcagtggacgggcctgtgctaatgggatccacatgaataggggctgcccctcggctgcagtgggctacccgggcatgaagccccagcagcactgcccaggcgagcttcagcaggtagcgcattcttgggtgtgggcggcaggtatgggacacccaggagggagtggctgggctgccttggggggcctcctccctcctagggtctcaggctgggctgctgggccaggctttctttagtcaggagcagatgctcctgttgttgagtgaagactggaaagttacctggactccccggcgtggccgtctcattactcttccttttgagcagcagagtgacaccagcagcctgctgaggcagacccatcttggcaatggatatgacccccaaagtcaccagatcacgaggtaaccaggcctctcccctttcactcccaagccccacagcctcactttccctttagctcctcaaatccaaggcctgtcactgagagccaagcagtagtgctgtactcaggggtccccgtgactgacaatcatgctcctctgaaccattgccctaataggcagttgttgcatttgcaattgcgatgccctttctgcctgagggcatggcttggcatctcggaatcctccgtcactagacagatcagaagcacccaccacaactgactttgcccatgggcccctggacacctgacttcacattctcccacatggagtaaaatggaaatggactagaatgatcagtgggaatgatggtgtggtacctcttgatgttcaaaggggagagcagtccttgccccatctgagctctcaccagctctgatgccctcagacagggagacagccagcagggggatggggcgacaggcccaccctgcccagccccacctccccatctgggcttgtgcactgcaggggtcccaagtctagcccggacgagggctctttcttatacacactgcccgacgactccactcaccagctgctgcagccccatcacgactgctgccaacgccaggagcagcctgctgctgtgggccagtcaggggtgaggagagcccccgacagtcctgtcctggaagcagtgtgggaccctccatttcactcaggttggttccaggagcagggcagggaaattaaacaggctgggggtgacatgaggtaggcatccacaagccagtagtaacagtcttcaaaggtggggcttggtaaggagccagccacagcatttatgtgggagggatggggcatcgagggtggctggccactttccttcactgctgaaggcccagtaggtctgtgggatgtccaagtgggttctactgcaacatgataagctgcggtcctcagcctctgagaaaaaggctatttctccatttcagagaaaaaagccctttttggtctgtgcatttcaaggccattcacaaattccatttgctgctcatcacactaagaggcattctctaatcactctgaaatgccttgctttgttgaggcttgtctcttaattaaggaataaggttgcctcaatcattaaggagccaaattcttacaaacatcatcatcataactctttgtacttccacggaactttttctccaaggagttttgggccattcacgctaagcccatcccattgtcttcctccatgctagtctccttagaaatcagtggatacttggtgagggcaccaagtatccactaacgtttcttagcttctctgtgtgtgtgcccattcataggcagatcctggactctgtctctaggagattaaatttaaaagatgctgggtcctaaagctcgacccagcatcatttaaactggaccgtgtcaatctggggggactggattgtgagtgggatgattgtaaccagaagccatagcaaagggtggactagccgcctaaacatagaaagagcagggcttccttctgcgtttcacgggctgcactgacttcatctgctcctgtggtgtgggctcagtgcgggagtctctacagtcccagcatgagtgggaaatgggtggcaagtggccctccctgttttgatgagagaccttggagggaacagaagtgcccttgtctcggttgtaggtttctgtcccctttccagagccagtgtaaccacctccaccacagatagagattggcccagtgtcactgggtgttggctcctcggtcaatctggattttaatggttcctactctttctcccctcagggcccccatgctgcttgggccttgtgccagttgaagaggtggacagtcctgactcctgccaagtgagtggaggagactggtgtccccagcaccccgtaggggcctacgtaggacaggaacctggaatgcagctctccccggggccactggtgcgtgtgtcttttgaaacaccacctctcacaatttaggcagaagctgatatcccagaaagactatatattgttttttttttaaaaaaaaaaagaagaaaaaagagacagagaaaattggtatttatttttctattatagccatatttatatatttatgcacttgtaaataaatgtatatgttttataattctggagagacataaggagtcctacccgttgaggttggagagggaaaataaagaagctgccacctaacaggagtcacccaggaaagcaccgcacaggctggcgcgggacagactcctaacctggggcctctgcagtggcaggcgaggctgcaggaggcccacagataagctggcaagaggaaggatcccaggcacatggttcatcacgagcatgagggaacagcaaggggcacggtatcacagcctggagacacccacacagatggctggatccggtgctacgggaaacattttcctaagatgcccatgagaacagaccaagatgtgtacagcactatgagcattaaaaaaccttccagaatcaataatccgtggcaacatatctctgtaaaaacaaacactgtaacttctaaataaatgtttagtcttccctgtaaccttcaaactgagtcatgtgtgagtcagcattttctttacatgttagaattcagtctctgagtatttgaagaaaatacccacttacaatattttcaggtccatcagaaatgagatctgaaaaaggtagtaaatgtttctcttttttgttttttaaaacagtgaatgtcagttgtgcttggattcatgcagaacacattaccgtttagtccacaagggaaccgttgtacaacagaccaggaaaaacaggttcatagttctcttaccaactggacttgagatgaagtttaggtcatattgaagaaatagaactaatcttttttatataggtgtgtgttgaagaccaaatattttctccaaaatactgtttagctaagtgctgtgccacacatggacatatggtgcataataaattcacttcccttctttccaaagatacaccaacattgccagagtagttgactcactagtttaaaatcaacatttacttactgttgtccaaccaaaggatcaaccatagattcttttttaattgaaattttaaaatctttatatgtggaagtggaattagatggagactgatgcttgcaatgaaagccttactacgctttgtgttttggggctggagagggtggggggagcctgtattttctagatttctgtaaaattgagttacagatgaaatgccacttgagacaatctcgttaagtggggggccagaccctggcttttaaacatgaagaatttgataaacagggtcctagggaagagtcactctgactgtttagggcaagtgcatcctctgctggccaaaataagtatagcacctgctattcctgacttctgcatcctttttccatcaagctcaacgtcagagagaacttcatgtggaagtgcagcatggttttcaggaaagcagtatttt

SEQ ID NO: 921 - DNA, 4513 bp, Homo sapiens
caggcctttgatgacttcatctttgccttctttgccgtggagatggtggtgaagatggtggccttgggcatctttgggaaaaagtgttacctgggagacacttggaaccggcttgactttttcatcgtcatcgcagggtgaggacctgggctggggtgggagagcaatggatcagatcggtcccttccccggggccagggttctgggcctgtgacctctcagctccagcccagttacagcaccactttctccctggctatctcctgagggtctgaggctgccctgcctctagcactgtagcctatattctaaattccaaggccctattcctaattctgcccccttctctgatgggcaatctgtccttgtctcggggtagccttgccccccagacagagagccggatcttcagggtcccttggtgaagaagaagaaggagtcagaggtcatcctgctgcccctaaagcaggattcctcattgacctcttttgaccccactgtggcctcagactcaaagggcctccctttgggcccctccctgcaggatgctggagtactcgctggacctgcagaacgtcagcttctcagctgtcaggacagtccgtgtgctgcgaccgctcagggccattaaccgggtgcccagtgagtgacccctcagccctcagcccctgaagagagccccaggaggaaatgtggaactctcagaccccacctctactactgtgtcctcacctgacccctcacaggccccgtcagagaagggctcagtggggagctgggattgctggaacaaaatggaactcctgaatgtggcactatgggagttacctgggaaaaccccacctcattttagcctggctttaggtcagagtctcagaaacatctcagatgaccctcttccttcagctagatgaccactccccccaggaggataggggtgtggggactggagaggctgacaggcaaggagtggacgcaaagtgctaatggccttttctagccagaacagcctctcatgcaatctggttcttgctggtgagacacgctggccacgctgaacgtgacttctctcaagacaaggccactccatgtctcaccctccgcctctgtccccttcctccttcccgcccccttccaacccattgcagtaactgccgggcccattatctaaattaaactgcattggtttctggagccagcgaggctttggcagctctagttctccctacatactgccccctccctttgctcaggccccctttgcaactccccaacctacacaagctgcagatggtccctgctgtggtcctaggagtggggtggttggcgaggaatgcatgtttctggggctcagtgcctgtttgtgtacctgatgtagcagcagccccctgcgctctgtgtgtgtgtgtgtgtgtgtgtgtgtgtgtgatgttgctgctgcccctgggagggcagagctgttgaatgtgtcctctggggctcggggtgtgttggtgttaacaggagctccagaagaggggcatgcctcgcctcctctcccgccccaggtgatggctggcagatttataggcctctgtctaaccaccggtgtaattcccttaatgcaaaccctgaggaattgatctcagttggagcacagagaagctgaagggggatggggtaggaggagggggagggagactgagtgagaaaactgggctggcaggggcgaggctgggcgctgcagtcaccaagagggttaattagctgctgcttagcagcttttgccctggaggggccagggggccatagatggcactttgggggtgaagccagccattagagatctgtctgcttgacgagggcttggcggactgggggctggttcagaccatttgggccggttgggttctagacctggagtacggagagagggaagtaaccctaacagggcttttgaggagggggtttcagtggctttccctatggagggggttgtaaattgatggacttctgagaagacagtattgtatctcttcaggtcctgatttggggatctggaccaagcagggaatagtttcagggaagcagggctcagagccatagtgaagcacagggcatcttggcccctgcctaggagctggctctcaaaatgagattcctgcctgctgtcattcctcctggagttcgctgcctcagtttccctaatgactctggtggtgataacttagaaaggtcaagtgactgtgcctgttgagagaaggaagtaggtagggagtgtgcgtgtgaatgtgtgcgggtgtgggtgtgtgttggagagggattcggaagccaaagcctgggttcgagttccggcacctacacttagcagctgtgtgatactgggtgagtcaagtcatttctccaagcctcagacttctcatctgtgaattgggagtgatattatccacatgtgatgatgttgggagagttaggaggggccacagtttccccagctcactgttggtggtactgtgcagattaccgtgggcaagccacaaggggaagtgggtcggggcaaggggctgcagaggctatctggggagtcagaggtgtctgttggtctcccctccagcttgagccgggccgtctcagcctcagagtccctggtggggcccctccgggagtgctgccgggccgtggcagtcagcctagcccggccagcctggtgtccccagcgtggcttctgcccccacaggcatgcgcatccttgtcacgttgctgctggatacgctgcccatgctgggcaacgtcctgctgctctgcttcttcgtcttcttcatcttcggcatcgtcggcgtccagctgtgggcagggctgcttcggaaccgatgcttcctacctgagaatttcagcctgtgagtggtggacagggtccagggaggacctgggagtggttatggggctgggcacccccccaagttcctcacttccggttgctactgacatatctgttctaacatctgagacatatctggttctcaaacttggctacccattggaaccacctggggagttttaaaaagtactgatgcctgggtgccacctccagagattctgatttcattgctctggggctcagcttggatgtaaggattttttcaacccctccagtgatcctaacttgcagtgaaatttgaaaatcactattccaggatgtgaccttccaacatcctgagtctggagtttccccactcaggcctcatgctcctggtgcccacaaatccctgccctgcccagtcccttccccattcttggttctgccctgctcaccctatatgcctcgagcactcgtgccatctctcccttcctgggccctctccctggagagcccactccccagtctcacccctgttccccttcccatcctgcagccccctgagcgtggacctggagcgctattaccagacagagaacgaggatgagagccccttcatctgctcccagccacgcgagaacggcatgcggtcctgcagaagcgtgcccacgctgcgcggggacgggggcggtggcccaccttgcggtctggactatgaggcctacaacagctccagcaacaccacctgtgtcaactggaaccagtactacaccaactgctcagcgggggagcacaaccccttcaagggcgccatcaactttgacaacattggctatgcctggatcgccatcttccaggtggggcagcctgggccccgggagcttccccagaacaccagccccaggacacagcccaggatcggagtggtcgctctcagggttggggtgggggtcaaggcctctggaggagactgaaggaggatttggtgggcccatagtcagcctgcccctctgcaccccctaggtcatcacgctggagggctgggtcgacatcatgtactttgtgatggatgctcattccttctacaatttcatctacttcatcctcctcatcatcgtgagtgactcctcagatccccgtggggatgggcgatcctggggacacctgtgggggcagtccagagaggggatagtttgctctgtctgaagtttttagctctcaggacaagtcatgtagagagggcatccatcatatagtaggagggacgccagatgcagagtcaggaggaaatccaaggtcaaggcgggacttaactgctattgggaccttgggcaagtcattctccatgaggcctccagcactgctctgggcctctgtttcttcatgggtaaaatgaatggttctcaacctgagatgataccacctctcccagagggcatttggaaatgggaaagggtgattctggttttgattttttttaatagctttattgagacataactcacatatcattcaattcatccctttgaatgaatccagtggttttttaagcatgtttacagagttctgtttttttgtaaggacaaggggagtgcaattggcaatttgttactgggggaggggagagaagctaaacatcctgaaatgcttgcaaataaagaattattctacccaaaa

SEQ ID NO: 922 - DNA, 4531 bp, Homo sapiens
caggcctttgatgacttcatctttgccttctttgccgtggagatggtggtgaagatggtggccttgggcatctttgggaaaaagtgttacctgggagacacttggaaccggcttgactttttcatcgtcatcgcagggtgaggacctgggctggggtgggagagcaatggatcagatcggtcccttccccggggccagggttctgggcctgtgacctctcagctccagcccagttacagcaccactttctccctggctatctcctgagggtctgaggctgccctgcctctagcactgtagcctatattctaaattccaaggccctattcctaattctgcccccttctctgatgggcaatctgtccttgtctcggggtagccttgccccccagacagagagccggatcttcagggtcccttggtgaagaagaagaaggagtcagaggtcatcctgctgcccctaaagcaggattcctcattgacctcttttgaccccactgtggcctcagactcaaagggcctccctttgggcccctccctgcaggatgctggagtactcgctggacctgcagaacgtcagcttctcagctgtcaggacagtccgtgtgctgcgaccgctcagggccattaaccgggtgcccagtgagtgacccctcagccctcagcccctgaagagagccccaggaggaaatgtggaactctcagaccccacctctactactgtgtcctcacctgacccctcacaggccccgtcagagaagggctcagtggggagctgggattgctggaacaaaatggaactcctgaatgtggcactatgggagttacctgggaaaaccccacctcattttagcctggctttaggtcagagtctcagaaacatctcagatgaccctcttccttcagctagatgaccactccccccaggaggataggggtgtggggactggagaggctgacaggcaaggagtggacgcaaagtgctaatggccttttctagccagaacagcctctcatgcaatctggttcttgctggtgagacacgctggccacgctgaacgtgacttctctcaagacaaggccactccatgtctcaccctccgcctctgtccccttcctccttcccgcccccttccaacccattgcagtaactgccgggcccattatctaaattaaactgcattggtttctggagccagcgaggctttggcagctctagttctccctacatactgccccctccctttgctcaggccccctttgcaactccccaacctacacaagctgcagatggtccctgctgtggtcctaggagtggggtggttggcgaggaatgcatgtttctggggctcagtgcctgtttgtgtacctgatgtagcagcagccccctgcgctctgtgtgtgtgtgtgtgtgtgtgtgtgtgtgtgtgtgtgtgtgtgtgtgtgatgttgctgctgcccctgggagggcagagctgttgaatgtgtcctctggggctcggggtgtgttggtgttaacaggagctccagaagaggggcatgcctcgcctcctctcccgccccaggtgatggctggcagatttataggcctctgtctaaccaccggtgtaattcccttaatgcaaaccctgaggaattgatctcagttggagcacagagaagctgaagggggatggggtaggaggagggggagggagactgagtgagaaaactgggctggcaggggcgaggctgggcgctgcagtcaccaagagggttaattagctgctgcttagcagcttttgccctggaggggccagggggccatagatggcactttgggggtgaagccagccattagagatctgtctgcttgacgagggcttggcggactgggggctggttcagaccatttgggccggttgggttctagacctggagtacggagagagggaagtaaccctaacagggcttttgaggagggggtttcagtggctttccctatggagggggttgtaaattgatggacttctgagaagacagtattgtatctcttcaggtcctgatttggggatctggaccaagcagggaatagtttcagggaagcagggctcagagccatagtgaagcacagggcatcttggcccctgcctaggagctggctctcaaaatgagattcctgcctgctgtcattcctcctggagttcgctgcctcagtttccctaatgactctggtggtgataacttagaaaggtcaagtgactgtgcctgttgagagaaggaagtaggtagggagtgtgcgtgtgaatgtgtgcgggtgtgggtgtgtgttggagagggattcggaagccaaagcctgggttcgagttccggcacctacacttagcagctgtgtgatactgggtgagtcaagtcatttctccaagcctcagacttctcatctgtgaattgggagtgatattatccacatgtgatgatgttgggagagttaggaggggccacagtttccccagctcactgttggtggtactgtgcagattaccgtgggcaagccacaaggggaagtgggtcggggcaaggggctgcagaggctatctggggagtcagaggtgtctgttggtctcccctccagcttgagccgggccgtctcagcctcagagtccctggtggggcccctccgggagtgctgccgggccgtggcagtcagcctagcccggccagcctggtgtccccagcgtggcttctgcccccacaggcatgcgcatccttgtcacgttgctgctggatacgctgcccatgctgggcaacgtcctgctgctctgcttcttcgtcttcttcatcttcggcatcgtcggcgtccagctgtgggcagggctgcttcggaaccgatgcttcctacctgagaatttcagcctgtgagtggtggacagggtccagggaggacctgggagtggttatggggctgggcacccccccaagttcctcacttccggttgctactgacatatctgttctaacatctgagacatatctggttctcaaacttggctacccattggaaccacctggggagttttaaaaagtactgatgcctgggtgccacctccagagattctgatttcattgctctggggctcagcttggatgtaaggattttttcaacccctccagtgatcctaacttgcagtgaaatttgaaaatcactattccaggatgtgaccttccaacatcctgagtctggagtttccccactcaggcctcatgctcctggtgctcacaaatccctgccctgcccagtcccttccccattcttggttctgccctgctcaccctatatgcctcgagcactcgtgccatctctcccttcctgggccctctccctggagagcccactccccagtctcacccctgttccccttcccatcctgcagccccctgagcgtggacctggagcgctattaccagacagagaacgaggatgagagccccttcatctgctcccagccacgcgagaacggcatgcggtcctgcagaagcgtgcccacgctgcgcggggacgggggcggtggcccaccttgcggtctggactatgaggcctacaacagctccagcaacaccacctgtgtcaactggaaccagtactacaccaactgctcagcgggggagcacaaccccttcaagggcgccatcaactttgacaacattggctatgcctggatcgccatcttccaggtggggcagcctgggccccgggagcttccccagaacaccagccccaggacacagcccaggatcggagtggtcgctctcagggttggggtgggggtcaaggcctctggaggagactgaaggaggatttggtgggcccatagtcagcctgcccctctgcaccccctaggtcatcacgctggagggctgggtcgacatcatgtactttgtgatggatgctcattccttctacaatttcatctacttcatcctcctcatcatcgtgagtgactcctcagatccccgtggggatgggcgatcctggggacacctgtgggggcagtccagagaggggatagtttgctctgtctgaagtttttagctctcaggacaagtcctgtagagagggcatccatcatatagtaggagggacaccagatgcagagtcaggaggaaatccaaggtcaaggcgggacttaactgctattgggaccttgggcaagtcattctccatgaggcctccagcactgctctgggcctctgtttcttcatgggtaaaatgaatggttctcaacctgagatgataccacctctcccagagggcatttggaaatgggaaagggtgattctggttttgattttttttaatagctttattgagacataactcacatatcattcaattcatccctttgaatgaatccagtggttttttaagcatgtttacagagttctgtttttttgtaaggacaaggggagtgcaattggcaatttgttactgggggaggggagagaagctaaacatcctgaaatgcttgcaaataaagaattattctacccaaaa

SEQ ID NO: 923 - DNA, 6610 bp, Homo sapiens
gcggccgctgtcagtgccgcgagcgtacgttcggcgcgcgctgcgatcgctactgccagtgcttccgcggccgctgccaccctgtggacggcacgtgtgcctgcgagccgggctaccgcggcaagtactgtcgcgagccgtgccccgccggcttctacggcttgggctgtcgccgccggtaagcgcggtctctcggccagggagggaggaggtggaagggcgggccgccgatggggacaggggtgaggcgggtcccagccttccctagcctccgacccctcccccaggtgtggccagtgcaagggccagcagccgtgcacggtggccgagggccgctgcttgacgtgcgagcccggctggaacggaaccaagtgcgaccagccttgcgccaccggtttctatggcgagggctgcagccaccgctgtccgccatgccgcgacgggcatgcctgtaaccatgtcaccggcaagtgtacgcgctgcaacgcgggctggatcggcgaccggtgagcagccctgcctgcgtcggcccagacacgcagtcccccgccctgcctccctaacaaaggccccaatgtcgagggcgctgtggtccgtttgcctccatttctgctgacgcctcctcccctctttccaaggtgcgagaccaagtgtagcaatggcacttacggcgaggactgcgccttcgtgtgcgccgactgcggcagcggacactgcgacttccagtcggggcgctgcctgtgcagccctggcgtccacgggccccagtgagtgccccgggaccgggagggggttgggggcttgtacctgccacagaggggggtccagccgacgaggtggcctctccaccctgagctgggttatcacctcagccttggtcccttaccccagctagggagtgacagtaggctctttgggggcagtttcctgcctggatgtcggggagctcacgttcagcgcaggatctggtgaccagtccagcctgtgtcagtgggctcttaaggtgaccccgagttggtacagaaggaccagggacctccacttacagccaagggtctggttcagcagcccctcttcccacctagccgagtcagccccagcagtgggcgctgcggcgcggccaccacgggtcctatcccccaggcccccccactagtgttgtgcaacattcgtttccaaaacatccactacccaatatgtgccacgggcggggcggggcttcaatccctagacgacgaatgcagcgagagagagcccggttctgggaccctggaccctgggccctggccgcgggtgaggggtgagggtagggggcatcctaggggggcggctgtggcatgccttgaccctatgtcccggcagctgtaacgtgacgtgcccgcccggactccacggcgcggactgtgctcaggcctgcagctgccacgaggacacgtgcgacccggtcactggtgcctgccacctaggtaagtggatgaggggcgtcccgttaaggaatgcagggggtgccagaaaccgcgctgaccccataaccccctacagaaaccaaccagcgcaagggcgtgatgggcgcgggcgcgctgctcgtcctgctcgtctgcctgctgctctcgctgctcggctgctgctgcgcttgccgcggcaaggaccctacgcgccggtgagcccagatactgccccgctttcgcctgggttcaggccgcaccctctgggtgccaccggacccagatccaacccttccgcgcccctgccccggacgtggccccgccccttctgtgcttggctccggccgagatctaatcgcccctgggccccgccccggccccgcccctccgctcagaccccgcccccgcagggagctttcgcttgggaggaagaaggcgccgcaccgactatgcgggcgcttcagtcgcatcagcatgaagctgccccggatcccgctccggaggcagaaactacccaaagtcgtaggtaaggatgacagcgcggggtatctgggagaaacacctctcgacgcaggaagctgctgggaaatgggtgtgagggggtccagatctcagtgaggaaatgggggaccttgagtgttgatgtgcgtgggcgcgaggaggtgcgaccagagggaaggtaagaggtgtggcagctgctgagggcgaggcaaggtaggaaggcaggagtcctaggtgcgccggctgatgtgggcatatgtcagaaacgttggccctgagagtgatcgcatcaggggtgtgtggacatctgggtcccgcaggctcccccagtctgtaggagaatgctgtatatcccggccagagctgctgggggaatgcgtggccacgggagtgccctgccccacggagaggacccaccctcctgcctacatccccagcagtacccagagatcctcctggaaagtgggcaggctggtccccacccaccaacaggataggggggtggggtgtgccgcttctctccatgctgacttgcacctgggtggaccctctcttcctctctttcccacttatttctaaagatggaggggaagggggctcagactcttgggagatgaaggaaacagctgagaaaaccccttagccaagccgggcatggtggctcatgcctgtaatctcagcactttgggaggccgaggcaggtggatcacctgaggcctggagttcaagaccagcctgaccaacatggagaaacccggtctctactaaaaatacgaaagtagccgggtgtggtggcgcatgcctataatcccagctactctggaggctgaggcaagagaatcacttgaacctgggaggcagaggttgcagggaggcagaggttgcagtgagccgagatcgcaccattgcactccagcctgggcaacaagagcaaaactgtcaagaaaaaagagaagagaagagaggagaggagaggagaagagaagagaagagaaaagaagaaagagaaggaagggagggagggagggagggagggaggagaaaccccaaaactgtcgaaagaaaagaaaaagcaagcaagcaagagagagaaaaccccttggcccacctagcagcatggcatctggggacataggtgtggggagtggaccccacatccctctgtggaatggaggccaggctagccagcttctggggccccctgttgtggggtctgcatctctggaggccaggcctagggtgcagcttgctgagatgggctgagccaaagggcagccctgccactgcgcatttgggctcagaagtgctccaaggcttccttattcgcacaaggcagggcctaaaacagagcttggaggccttggtggcctgtcccagccaggtgtcttcttcagccccgtctcccacctttctggccttttctcaacacgtcagcccaaccttttccagctccctggatgcacacacttgccttgcaccttaacacatgttgtgcccatgtttcttttctgggttcacctctacccattctccagtcctggcccagtgtcactgtacctgttgagttgcctgtgccccctgcagtccaagaatagggctggtcttggtcaccccatcaacatttgtcacagcaggggctaatgagggcaccggctggggcagagtggacccctggcagctctgcctcatccttccccagtggcccaccacgacctggataacacactcaactgcagcttcctggagccaccctcagggctggagcagccctcaccatcctggtcctctcgggcctccttctcctcgtttgacaccactgatgaaggccctgtgtactgtgtaccccatgagggtaagtaaggccctacctgggcatcactccagcccagtgaaatgttcccatggaaaagctgtgttctgggtgggacacaggagaagggcaggcagcatggagaggaaggccttggccatgctggtacctgagggttgcccacagagctgaggccatagagctggactctgctgctcagtaccggagacaggtgtggggagatgggtaggccacagcccagggttgctcctgggggaaagtaggcagagagaagtttctgggcttaggtagggggtggcagaggagacaggaggaagggatccacagagtatgggagttggatccacacacagcctttgatccacagatagcagaaaggagcctgatggtctgggattctgccctgtctcctcccttgactgtgcccccagatgccacgggcaggtgaccaactcagagcctcagaagccttatcgctctttttttttttttgagacggagtctgcctctgtcacccaggctggagtgcagtggcatgatctccagtcactgcaacctctgcctcctgggttcaagcaattctcctgcctcagcctcccgagtagctgggattacaggcgcccacgaccacgcccagctaatttttgtatttttagtagagacagggtttcaccatattggccaggctggtctcaaactcctgacctcaggtgaccgcagcctcccaaagtgctgggattacaggcgtgagccaccacgcccagctagaagccttctctcttaaagaaggataatggaacccctgtggggatgttccagcctcaaattcgatgatgcaggcgcccaaggctggaggggtgttggggcagggctgccaggccaggccaaggttgggcttcagtcgcgggaatgcgcccatcactccttgcacagcctgagttcagagtcagccgcatagcctgaggctctgaagtacacatgtgtggttggtgctctgtgccaggcacgtctagatgccagggtgacacagtgccaagggcgtgggtagaggaggaaaggtgaaggtttgcgcctggaggttggagcccctaaaggtattcctgaaggctgtgaccgccctgctcttcccttgccagaggcaccagcggagagccgggaccccgaagtccccactgtccctgccgaggcgccggcgccgtcccctgtgcccttgaccacgccagcctccgccgaggaggcgatacccctccccgcgtcctccgacagcgagcggtcggcgtccagcgtggaggggcccggaggggctctgtacgcgcgcgtggcccgacgcgaggcccggccggcccgggcccggggcgagattgggggcctgtcgctgtcgccatcgcccgagcgcaggaaaccgccgccacctgaccccgccaccaagcctaaggtgtcctggatccacggcaagcacagcgccgctgcagctggccgtgcgccctcaccaccgccgccaggctccgaggccgcgcccagccccagcaagaggaaacggacgcccagcgacaaatcggcgcatacggtcgaacacggcagcccccggacccgcgacccaacgccgcgccccccggggctgcccgaggaggcgacagccctcgctgcgccctcgccgcccagggcccgagcgcgcgccgcgccccggcctcttggagcccacggacgccggcggtcccccgcgaagcgcgccgaggctgcctccatgttggccgctgacgtgcgcggcaagactcgcagcctgggccgcgccgaggtggccctgggcgcgcagggccccagggaaaagccggcgcccccacagaaagccaagcgctccgtgccgccagcctcgcccgcccgcgcgcccccagcgaccgaaaccccggggcctgagaaggcggcgaccgacttgcccgcgcctgagaccccccggaagaagacccccatccagaagccgccgcgcaagaagagccgggaggcggcgggcgagctgggcagggcgggcgcacccaccctgtagcaggctgtggctcgtccgcgcgcagctccctcagcttcgcagcgccgcccgccaccccacacctcccacgctaccgggcacgggcggcctcctattggccgggcaccgcgcggctagcggaggttgcgtctcattggctcaggtcctgcagccgctcctggattggagcagtgtgctctggcgggaagggcccatcccgttggtcgaggcctgacaggcgcttagcgggcgactccctccccattggccgagttatggagcgctccgaccagacagcgtctcattggccaaagatgggagggttccgcttaaagaccgcctcttactggccaggagtggacttggttagggctaccttctcattggttgcagccagaggcacttctgcccgggctgcctctcccccgctagggcctggtgcctctggctggaggctccctcccttggccgtcccaatagagcccggggctacttccactggccaggctcccgggcatctggttgaccccagcctggggaggagggctggtctccgctcctcaggggcttagtccgtcccaccccttcccttccctggcgccccgggcccaggcccctcagctgtcagctggttttgatggcctcccactgccccacacgccgcgggacctccaggggcgactctagtggcctgaggagatgtatttataggcccccagcagggctgctcccccctcggccggtgccccaggatgggctcctcccggcgggggcttggccaaagctttcttaataaaatgcctttcccctcat

SEQ ID NO: 924 - DNA, 6610 bp, Homo sapiens; identical to SEQ ID NO: 923

SEQ ID NO: 925 - DNA, 602 bp, Homo sapiens
tgcgaaggcaactccacgtgctcagagaacgaggtgtgcgtgaggcctggcgagtgccgctgccgccacggctacttcggtgccaactgcgacaccagtgagcgtggggtcgggccggtattggtcggtggggcggaatcctggagagatggggcggggtccaaggtggggcggggtcggatccgccttcggggcgggtccccagaggtggcggctggagtgcgggacgcgggcaggttccggctggctgggggcacctactcaagcaccggggccttccaccccctccgctcctcccctgcagagtgcccgcgccagttctggggccccgactgcaaggagctgtgtagctgccacccacacgggcagtgcgaggacgtgacaggccagtgtacttgtcacgcgcggcgctggggcgcgcgctgcgagcatgcgtgccagtgccagcacggcacgtgccacccccggagcggcgcgtgccgctgtgagtccggctggtggggcgcgcagtgcgccagcgcgtgctactgcagcgccacgtcgcgctgcgacccacagaccggcgcctgcctgtgccacgcaggctggtggggccgcagctg

SEQ ID NO: 926 - DNA, 602 bp, Homo sapiens
tgcgaaggcaactccacgtgctcagagaacgaggtgtgcgtgaggcctggcgagtgccgctgccgccacggctacttcggtgccaactgcgacaccagtgagcgtggggtcgggccggtattggtcggtggggcggaatcctggagagatggggcggggtccaaggtggggcggggtcggatccgccttcggggcgggtccccagaggtggcggctggagtgcgggacgcgggcaggttccggctggctgggggcacctactcaagcaccggggccttccaccccctccgctcctcccctgcagagtgcccgcgccagttctggggccccgactgcaaggagctgtgtagctgccacccacacgggcagtgcgaggacgtgacaggccagtgtacttgtcacgcgcggcgctggggcgcgcgctgcgagcatgcgtgccagtgccagcacggcacgtgccacccgcggagcggcgcgtgccgctgtgagcccggctggtggggcgcgcagtgcgccagcgcgtgctactgcagcgccacgtcgcgctgcgacccacagaccggcgcctgcctgtgccacgcaggctggtggggccgcagctg

SEQ ID NO: 927 - DNA, 362 bp, Homo sapiens
aaacttttataacaaaattaacatcaaaaggtatatactttttaaaaaaaatttacttttattgatgtgtactcttcctattgatgagttaattccataaatctctacttagtttaacttattggatcaaattatcttcagcatgtatatctggggaaaaaaggtccgaattttcacatttatatttaaacttcaattttttatatttaaacttcaattttttagcaacagctgaatagctttgcggaggagtttaatagttacacattcatgctaatatacatttcctttaaacatccacaaattcttaaaaagattgaatcagtaaatttcatttcagctaaaaatggagtctaatatat

SEQ ID NO: 928 - DNA, 1083 bp, Homo sapiens
ttttgtttactatgcataaaagtctacaatctaattaatagcaatactagatgtttattattagaaaagatgctgagagtatttatcaggttttacaaagtcattttaagaaagcaagatactgatgttaacagaataacatttttggggaagctggctccctattcatggtattttaagagatcatttgtatattatttatcacactgttgtaatgatgttttgagatacttttataacaaaattaacatcaaaaaggtatatactttttaaaaaaaatttacttttattgatgtgtactcttcctattgatgagttaattccataaatctctacttagtttaacttattggatcaaattatcttcagcatgtatatctggggaaaaaaggtccgaattttcacatttatatttaaacttcaattttttatatttaaacttcaattttttagcaacagctgaatagctttgcggaggagtttaatagttacacattcatgctaatatacatttcctttaaacatccacaaattcttaaaaagattgaatcagtaaatttcatttcagctaaaaatggagtctaatatattgtttcaaaagatacatttttacccaccataaatgttacaatatctgaatatgctttgtcaaactatccctttatgcaatcgtcttcatattgtttttatgattctaatcaagctgtatgtagagactgaatgtgaagtcaagtctgagcacaaaaagataatgcacgatgagattgcctaccattttataggatatttactatgtatttatacgttaagacctctatgaatgaatgtatcagagaatgtctttgtaactaactgtttaattcaatctgtaataaaaatctaactaactaactcatttatttctattaaaaaggtattgtcctttaggcggggaatgggaatccttgctgcactgttgcagtcattctgaaaggacctttccctgtacttacctttcaacatgcttcaatcttatcaacgctacattttgtatttttcaaacaagtataaattctgcaataaagagatgtagtttttttttaa

SEQ ID NO: 929 - DNA, 593 bp, Homo sapiens
ggattcaatcatctttattaacctatcatcagtgttacattttatacataatatcttgtattctcaaagggctctactttagtacatcatgttaatagtaaaaagccaagtaagatggctaaacctcaccctagcattttaatatcctccggacaagggaagctagaaagtcaagtcaatcactttatacatgtaagagtagtgttccaaagtaactaagaagctgctacatttttaagcagggaggaaaaaactttcattttggtctttgtgttccagcaaattatactttcaattaacaccaacaatgatatcataaaaaatgctctgcttttaaatttctgaacttcttcaatacaaattaaaatagtactggagtcttttgggaggccaatagctagcagctacattaattggtgtagaggagcctccttatcgataaccaggtccaggttgggtatagccctgaccaaagggaggacggttacgcgcataaggattaggcccacttggaggaggggtcatggtacttccaggaagtgaagtaaaacctggtcttggttgataggccccaggttggcttggagccattc

SEQ ID NO: 930 - DNA, 1574 bp, Homo sapiens
atcacaaagaaaatctttaagtcccaccttaagtcaagtcggaattccacttcggtcaaaaagaaatctagccgcaacatattcagcatcgtgtttgtgttttttgtctgttttgtaccttaccatattgccagaatcccctacacaaagagtcagaccgaagctcattacagctgccagtcaaaagaaatcttgcggtatatgaaagaattcactctgctactatctgctgcaaatgtatgcttggaccctattatttatttctttctatgccagccgtttagggaaatcttatgtaagaaattgcacattccattaaaagctcagaatgacctagacatttccagaatcaaaagaggaaatacaacacttgaaagcacagatactttgtgagttcctaccctcttccaaagaaagaccacgtgtgcatgttgtcatcttcaattacataacagaaatcaataagatatgtgccctcatcataaatatcatctctagcactgccatccaatttagttcaataaaattcaaatataagtttccatgcttttttgtaacatcaaagaaaacatacccatcagtaatttctctaatactgacctttctattctctattaataaaaaattaatacatacaattattcaattctattatattaaaataagttaaagtttataaccactagtctggtcagttaatgtagaaatttaaatagtaaataaaacacaacataatcaaagacaactcactcaggcatcttctttctctaaataccagaatctagtatgtaattgttttcaacactgtccttaaagactaacttgaaagcaggcacagtttgatgaagggctagagagctgtttgcaataaaaagtcaggtttttttcctgatttgaagaagcaggaaaagctgacacccagacaatcacttaagaaaccccttattgatgtatttcatggcactgcaaaggaagaggaatattaattgtatacttagcaagaaaattttttttttctgatagcactttgaggatattagatacatgctaaatatgttttctacaaagacttacgtcatttaatgagcctggggttctggtgttagaatatttttaagtaggctttactgagagaaactaaatattggcatacgttatcagcaacttcccctgttcaatagtatgggaaaaataagatgactgggaaaaagacacacccacaccgtagaacatatattaatctactggcgaatgggaaaggagaccattttcttagaaagcaaataaacttgatttttttaaatctaaaatttacattaatgagtgcaaaataacacataaaatgaaaattcacacatcacatttttctggaaaacagacggattttacttctggagacatggcatacggttactgacttatgagctaccaaaactaaattctttctctgctattaactggctagaagacattcatctatttttcaaatgttctttcaaaacatttttataagtaatgtttgtatctatttcatgctttactgtctatatactaataaagaaatgttttaatac

SEQ ID NO: 931 - DNA, 721 bp, Homo sapiens
tctcggcacagcgcgtgctgcccttcgacgacaacatctgcctgcgggagccctgcgagaactacatgcgctgcgtgtcggtgctgcgcttcgactcctccgcgcccttcatcgcctcctcctccgtgctcttccggcccatccaccccgtcggagggctgcgctgccgctgcccgcccggcttcacgggtgactactgcgagaccgaggtggacctctgctactcgcggccctgtggcccccacgggcgctgccgcagccgcgagggcggctacacctgcctctgtcgtgatggctacacgggtgagccaagggaggggactcatgggccagccctggaaggctgactgtgtggtgcaggcacaaatcaggacaaatgctggcggctgcctcattctcttcccgagtgaggtgcagctacactgagaggtcataaatccggcctgctccctgacagcaccccactgaggaaggcagtgcaaggagtgcttctccctgctgtgcacaggacacacaggcagtgccattgtgggcagagctggctccagagccagtcggcctgtgttcgtgtatcagctttgccgctagtagctgtgtgaccttgaacaagttacttaacctttctggccctcggttatttgaaatggagataatgaccgtacttaggtcataagttggttgtgaggattaatgtaattaatttgatacttggaaacagctg

SEQ ID NO: 932 - DNA, 721 bp, Homo sapiens
tctcggcacagcgcgtgctgcccttcgacgacaacatctgcctgcgggagccctgcgagaactacatgcgctgcgtgtcggtgctgcgcttcgactcctccgcgcccttcatcgcctcctcctccgtgctcttccggcccatccaccccgtcggagggctgcgctgccgctgcccgcccggcttcacgggtgactactgcgagaccgaggtggacctctgctactcgcggccctgtggcccccacgggcgctgccgcagccgcgagggcggctacacctgcctctgtcgtgatggctacacgggtgagccaagggaggggactcatgggccagccctggaaggctgactgtgtggtgcaggcacaaatcaggacaaatgctggcggctgcctcattctcttcccgagtgaggtgcagctacactgagaggtcataaatccggcctgctccctgacagcaccccactgaggaaggcagtgcaaggagtgcttctccctgctgtgcacaggacacacaggcagtgccattgcgggcagagctggctccagagccagtcggcctgtgttcgtgtatcagctttgccgctagtagctgtgtgaccttgaacaagttacttaacctttctggccctcagttatttgaaatggagataatgaccgtacttaggtcataagttggttgtgaggattaatgtaattaatttgatacttggaaacagctg

SEQ ID NO: 933 - DNA, 9656 bp, Homo sapiens; identical to SEQ ID NO: 886

SEQ ID NO: 934 - DNA, 602 bp, Homo sapiens; identical to SEQ ID NO: 891

SEQ ID NO: 935 - DNA, 9765 bp, Homo sapiens; identical to SEQ ID NO: 888

SEQ ID NO: 936 - DNA, 25395 bp, Homo sapiens; identical to SEQ ID NO: 890

SEQ ID NO: 937 - DNA, 8895 bp, Homo sapiens; identical to SEQ ID NO: 887

SEQ ID NO: 938 - DNA, 637 bp, Homo sapiens
ttacacttaagaatactggcctgaatttattagcttcattataaatcactgagctgatatttactcttccttttaagttttctaagtacgtctgtagcatgatggtatagattttcttgtttcagtgctttgggacagattttatattatgtcaattgatcaggttaaaattttcagtgtgtagttggcagatattttcaaaattacaatgcatttatggtgtctgggggcaggggaacatcagaaaggttaaattgggcaaaaatgcgtaagtcacaagaatttggatggtgcagttaatgttgaagttacagcatttcagattttattgtcagatatttagatgtttgttacatttttaaaaattgctcttaatttttaaactctcaatacaatatattttgaccttaccattattccagagattcagtattaaaaaaaaaaaaattacactgtggtagtggcatttaaacaatataatatattctaaacacaatgaaatagggaatataatgtatgaactttttgcattggcttgaagcaatataatatattgtaaacaaaacacagctcttacctaataaacattttatactgtttgtatgtataaaataaaggtgctgctttagttttctga

SEQ ID NO: 939 - DNA, 120 bp, Homo sapiens
ctccaggagaattcctgagttttgctgatgacttactctctggcctgggcacatcttgtgtagcagctggtcgaagccatggagaggtccctgaagtcagtatctactcagtcatcttca
